(19) United States
(12) Patent Application Publication
(10) Pub. No.: US 2013/0145497 A1
(43) Pub. Date: Jun. 6, 2013

(54) Plants Having Enhanced Yield-Related Traits and a Method for Making the Same

(71) Applicants: Yang Do Choi, Seoul (KR); Doil Choi, Seoul (KR); Christophe Reuzeau, Tocan Saint Apre (FR); Ji-Young Song, Daejeon (KR); Youn-Il Park, Daegeon (KR)

(72) Inventors: Yang Do Choi, Seoul (KR); Doil Choi, Seoul (KR); Christophe Reuzeau, Tocan Saint Apre (FR); Ji-Young Song, Daejeon (KR); Youn-Il Park, Daegeon (KR)

(73) Assignee: BASF Plant Science Company GmbH, Ludwigshafen (DE)

(21) Appl. No.: 13/498,003

(22) PCT Filed: Sep. 24, 2010
(86) PCT No.: PCT/EP10/64095

§ 371 Date: Mar. 23, 2012

Related U.S. Application Data
(60) Provisional application No. 61/252,220, filed on Oct. 16, 2009.
(60) Provisional application No. 61/252,215, filed on Oct. 16, 2009.
(60) Provisional application No. 61/260,942, filed on Nov. 13, 2009.

(30) Foreign Application Priority Data
Sep. 25, 2009 (EP) 09171364.4
Sep. 25, 2009 (EP) 09171385.9
Nov. 13, 2009 (EP) 09175989.4

(51) Int. Cl. C12N 15/82

(52) U.S. Cl. CPC C12N 15/8262
USPC 800/290; 800/320.2; 800/320.1; 800/320.3; 800/298; 435/320.1; 435/419; 435/6.11

(57) ABSTRACT

The present invention relates generally to the field of molecular biology and concerns a method for enhancing yield-related traits in plants by modulating expression in a plant of a nucleic acid encoding an SGT1 polypeptide, or a CLC-pKG polypeptide, or a HD-hydrolase-like polypeptide. The present invention also concerns plants having modulated expression of a nucleic acid encoding an SGT1 polypeptide, or a CLC-pKG polypeptide, or a HD-hydrolase-like polypeptide, which plants have enhanced yield-related traits relative to corresponding wild type plants or other control plants. The invention also provides constructs useful in the methods of the invention.

[0001] The present invention relates generally to the field of molecular biology and concerns a method for enhancing yield-related traits in plants by modulating expression in a plant of a nucleic acid encoding an SGT1 polypeptide, or a CLC-pKG polypeptide, or a HD-hydrolase-like polypeptide. The present invention also concerns plants having modulated expression of a nucleic acid encoding an SGT1 polypeptide, or a CLC-pKG polypeptide, or a HD-hydrolase-like polypeptide, which plants have enhanced yield-related traits relative to corresponding wild type plants or other control plants. The invention also provides constructs useful in the methods of the invention.

[0002] The ever-increasing world population and the dwindling supply of arable land available for agriculture fuels research towards increasing the efficiency of agriculture. Conventional means for crop and horticultural improvements utilise selective breeding techniques to identify plants having desirable characteristics. However, such selective breeding techniques have several drawbacks, namely that these techniques are typically labour intensive and result in plants that often contain heterogeneous genetic components that may not always result in the desirable trait being passed on from parent plants. Advances in molecular biology have allowed mankind to modify the germplasm of animals and plants. Genetic engineering of plants entails the isolation and manipulation of genetic material (typically in the form of DNA or RNA) and the subsequent introduction of that genetic material into a plant. Such technology has the capacity to deliver crops or plants having various improved economic, agronomic or horticultural traits.

[0003] A trait of particular economic interest is increased yield. Yield is normally defined as the measurable produce of economic value from a crop. This may be defined in terms of quantity and/or quality. Yield is directly dependent on several factors, for example, the number and size of the organs, plant architecture (for example, the number of branches), seed production, leaf senescence and more. Root development, nutrient uptake, stress tolerance and early vigour may also be important factors in determining yield. Optimizing the abovementioned factors may therefore contribute to increasing crop yield.

[0004] Seed yield is a particularly important trait, since the seeds of many plants are important for human and animal nutrition. Crops such as corn, rice, wheat, canola and soybean account for over half the total human caloric intake, whether through direct consumption of the seeds themselves or through consumption of meat products raised on processed seeds. They are also a source of sugars, oils and many kinds of metabolites used in industrial processes. Seeds contain an embryo (the source of new shoots and roots) and an endosperm (the source of nutrients for embryo growth during germination and during early growth of seedlings). The development of a seed involves many genes, and requires the transfer of metabolites from the roots, leaves and stems into the growing seed. The endosperm, in particular, assimilates the metabolic precursors of carbohydrates, oils and proteins and synthesizes them into storage macromolecules to fill out the grain.

[0005] Another important trait for many crops is early vigour. Improving early vigour is an important objective of modern rice breeding programs in both temperate and tropical rice cultivars. Long roots are important for proper soil anchorage in water-seeded rice. Where rice is sown directly into flooded fields, and where plants must emerge rapidly through water, longer shoots are associated with vigour. Where drill-seeding is practiced, longer mesocotyls and coleoptiles are important for good seedling emergence. The ability to engineer early vigour into plants would be of great importance in agriculture. For example, poor early vigour has been a limitation to the introduction of maize (Zea mays L.) hybrids based on Corn Belt germplasm in the European Atlantic.

[0006] A further important trait is that of improved abiotic stress tolerance. Abiotic stress is a primary cause of crop loss worldwide, reducing average yields for most major crop plants by more than 50% (Wang et al., Planta 218, 1-14, 2003). Abiotic stresses may be caused by drought, salinity, extremes of temperature, chemical toxicity and oxidative stress. The ability to improve plant tolerance to abiotic stress would be of great economic advantage to farmers worldwide and would allow for the cultivation of crops during adverse conditions and in territories where cultivation of crops may not otherwise be possible.

[0007] Crop yield may therefore be increased by optimising one of the above-mentioned factors.

[0008] Depending on the end use, the modification of certain yield traits may be favoured over others. For example for applications such as forage or wood production, or bio-fuel resource, an increase in the vegetative parts of a plant may be desirable, and for applications such as flour, starch or oil production, an increase in seed parameters may be particularly desirable. Even amongst the seed parameters, some may be favoured over others, depending on the application. Various mechanisms may contribute to increasing seed yield, whether that is in the form of increased seed size or increased seed number.

[0009] One approach to increasing yield (seed yield and/or biomass) in plants may be through modification of the inherent growth mechanisms of a plant, such as the cell cycle or various signalling pathways involved in plant growth or in defence mechanisms.

[0010] It has now been found that various yield-related traits may be improved in plants by modulating expression in a plant of a nucleic acid encoding an an SGT1 polypeptide, or a CLC-pKG polypeptide, or a HD-hydrolase-like polypeptide, in a plant.

### BACKGROUND

### 1. SGT1 Polypeptides

[0011] SGT1 is known as a suppressor allele of skp1 mutant.

[0012] Chung et al., 2006 report that SGT1 plays a crucial role in developmental processes. SGT1 has unique domains necessary for protein functions: tetratricopeptide repeat domain (TPR), CHORD and SGT1 motif (CS) and SGT1-specific motif (SGS motif). The TPR domain has been known to mediate protein-protein interactions among multicomplex proteins functioning as chaperone, cell cycle, transcription, or protein transport complexes. For example, the TPR domain of SGT1 was shown to bind to heat-shock protein 70 (HSP70). However, the CS domain of SGT1 is similar to the one in the human p23 protein, which is known to interact with HSP90 and participate in the folding of different regulatory proteins.

### 2. CLC-pKG Polypeptides

[0013] In both prokaryotic and eukaryotic organism, anion channels/transporters appear as key players in the control of metabolism, in the maintenance of electrochemical gradients and in signalling pathways leading to adaptation to abiotic and biotic environmental stresses. In plants, they contribute to various physiological functions such as control of stomatal movements regulating gas exchanges in leaves, plant-pathogen interaction, root xylem loading, compartmentation of metabolites and coupling with proton gradients (reviewed in De Angeli et al. 2007 Phil. Trans. R. Soc. B 2009 364, 195-201). Anion channel activities and associated regulation mechanisms have been characterized primarily using electrophysiological techniques. They were reported in all plant membranes including the plasma membrane, tonoplast, endoplasmic reticulum, mitochondria and chloroplasts, plasma membrane channels being by far the best characterized compared to those located on other membranes. In model plants such as rice and Arabidopsis there are up to seven genes encoding CLCs which are spread in over two distinct subfamilies (Marmagne et al. 2007, Journal of Experimental Botany, Vol. 58, No. 12, pp. 3385-3393). One of such subfamilies comprising the AtCLCe and AtCLCf proteins is close to the prokaryotic CLC, altogether belonging to the Chloride Channel Prokayotic Group while the other class is closer to the eukatyotic CLCs. The Arabidopsis thaliana AtCLCf protein is reported to have similar subcellular distribution and presumably similar function as those CLCs of Synechocystis CLC, considered to represent the ancestor precursor of plant chloroplast.

[0014] Nitrate and malate represent the majority of anions in a plant cell. Nitrate is a nutrient but can act as a signalling molecule as well. Plants have a sophisticated nitrate uptake system involving both low- and high-affinity transporters, nitrate is next either transported through the xylem to enter into the cellular metabolism or is stored locally. Cells assimilate nitrate via the nitrate reductase pathway or store it in the tonoplast, and a dynamic balance exists between cytosolic and vacuolar nitrate levels, regulated by uptake of extracellular nitrate, storage in the vacuole and anabolism. The discovery of the chloride channel (CLC) family allowed unravelling the mechanism of proton/nitrate exchange between tonoplasts and cytosol. Determination of subcellular localization, expression patterns, and characterization of knockout mutant phenotypes, gave insight in the physiological role of CLC proteins. Phenotypic analyses showed that cica-1 and cica-2 mutant plants have a reduced nitrate compared to that of wild-type in root and shoot tissues. Also cicc and cice mutants showed lower nitrate levels compared to control plants. An overview of the art is provided by De Angeli et al., Phil. Trans. R. Soc. B 364, 195-201, 2009; and the references cited therein. However, still little is know about the precise role of CLC proteins, and the effect of overexpressing CLC genes on plant phenotypes.

### 3. HD-Hydrolase-Like Polypeptides

[0015] The HD domain comprises a sequence of two small amino acids, followed by two hydrophobic amino acids, a histidine and an aspartic acid, again a hydrophobic amino acid, a small amino acid and a charged amino acid. Because of its weak sequence conservation, it was only recently discovered (Aravind and Koonin, Trends in Biochemical Sciences, 23: 469-472, 1998). The domain is reportedly present in metal-dependent phosphohydrolases, including nucleic acid polymerases and helicases (Aravind and Koonin, 1998). Although the HD-domain comprising proteins are predicted to exhibit phosphohydrolase activity and appears to be involved in nucleic acid metabolism or in signal transduction (Galperin et al., J. Mol. Microbiol. Biotechnol. 1, 303-305, 1999), the precise biological role of the HD domain remains to be elucidated.

### SUMMARY

### 1. SGT1 Polypeptides

[0016] Surprisingly, it has now been found that modulating expression of a nucleic acid encoding an SGT1 polypeptide gives plants having enhanced yield-related traits, in particular increased seed yield relative to control plants.

[0017] According to one embodiment of the present invention, there is provided a method for improving yield-related traits in plants relative to control plants, comprising modulating expression in a plant of a nucleic acid encoding an SGT1 polypeptide.

### 2. CLC-pKG Polypeptides

[0018] Surprisingly, it has now been found that modulating expression of a nucleic acid encoding a CLC-pKG polypeptide gives plants having enhanced yield-related traits relative to control plants.

[0019] According one embodiment, there is provided a method for enhancing or improving yield-related traits in plants relative to control plants, comprising modulating expression in a plant of a nucleic acid encoding a CLC-pKG polypeptide.

### 3. HD-Hydrolase-Like Polypeptides

[0020] Surprisingly, it has now been found that modulating expression of a nucleic acid encoding a HD-hydrolase-like polypeptide gives plants having enhanced yield-related traits, in particular increased yield relative to control plants.

[0021] According one embodiment, there is provided a method for improving yield-related traits in plants relative to control plants, comprising modulating expression in a plant of a nucleic acid encoding a HD-hydrolase-like polypeptide.

### DEFINITIONS

[0022] The following definitions will be used throughout the present specification.

### Polypeptide(s)/Protein(s)

[0023] The terms “polypeptide” and “protein” are used interchangeably herein and refer to amino acids in a polymeric form of any length, linked together by peptide bonds.

### Polynucleotide(s)/Nucleic Acid(s)/Nucleic Acid Sequence(s)/Nucleotide Sequence(s)

[0024] The terms “polynucleotide(s)”, “nucleic acid sequence(s)”, “nucleotide sequence(s)”, “nucleic acid(s)”, “nucleic acid molecule” are used interchangeably herein and refer to nucleotides, either ribonucleotides or deoxyribonucleotides or a combination of both, in a polymeric unbranched form of any length.

### Homologue(s)

[0025] “Homologues” of a protein encompass peptides, oligopeptides, polypeptides, proteins and enzymes having amino acid substitutions, deletions and/or insertions relative to the unmodified protein in question and having similar biological and functional activity as the unmodified protein from which they are derived.

[0026] A deletion refers to removal of one or more amino acids from a protein.

[0027] An insertion refers to one or more amino acid residues being introduced into a predetermined site in a protein. Insertions may comprise N-terminal and/or C-terminal fusions as well as intra-sequence insertions of single or multiple amino acids. Generally, insertions within the amino acid sequence will be smaller than N- or C-terminal fusions, of the order of about 1 to 10 residues. Examples of N- or C-terminal fusion proteins or peptides include the binding domain or activation domain of a transcriptional activator as used in the yeast two-hybrid system, phage coat proteins, (histidine)-6-tag, glutathione S-transferase-tag, protein A, maltose-binding protein, dihydrofolate reductase, Tag•100 epitope, c-myc epitope, FLAG®-epitope, lacZ, CMP (calmodulin-binding peptide), HA epitope, protein C epitope and VSV epitope.

[0028] A substitution refers to replacement of amino acids of the protein with other amino acids having similar properties (such as similar hydrophobicity, hydrophilicity, antigenicity, propensity to form or break α-helical structures or β-sheet structures). Amino acid substitutions are typically of single residues, but may be clustered depending upon functional constraints placed upon the polypeptide and may range from 1 to 10 amino acids; insertions will usually be of the order of about 1 to 10 amino acid residues. The amino acid substitutions are preferably conservative amino acid substitutions. Conservative substitution tables are well known in the art (see for example Creighton (1984) Proteins. W.H. Freeman and Company (Eds) and Table 1 below).

TABLE 1
Examples of conserved amino acid substitutions

| Residue | Conservative Substitutions | Residue | Conservative Substitutions |
|---|---|---|---|
| Ala | Ser | Leu | Ile; Val |
| Arg | Lys | Lys | Arg; Gin |
| Asn | Gln; His | Met | Leu; Ile |
| Asp | Glu | Phe | Met; Leu; Tyr |
| Gin | Asn | Ser | Thr; Gly |
| Cys | Ser | Thr | Ser; Val |
| Glu | Asp | Trp | Tyr |
| Gly | Pro | Tyr | Trp; Phe |
| His | Asn; Gln | Val | Ile; Leu |
| Ile | Leu, Val | | |

[0029] Amino acid substitutions, deletions and/or insertions may readily be made using peptide synthetic techniques well known in the art, such as solid phase peptide synthesis and the like, or by recombinant DNA manipulation. Methods for the manipulation of DNA sequences to produce substitution, insertion or deletion variants of a protein are well known in the art. For example, techniques for making substitution mutations at predetermined sites in DNA are well known to those skilled in the art and include M13 mutagenesis, T7-Gen in vitro mutagenesis (USB, Cleveland, Ohio), QuickChange Site Directed mutagenesis (Stratagene, San Diego, Calif.), PCR-mediated site-directed mutagenesis or other site-directed mutagenesis protocols.

### Derivatives

[0030] “Derivatives” include peptides, oligopeptides, polypeptides which may, compared to the amino acid sequence of the naturally-occurring form of the protein, such as the protein of interest, comprise substitutions of amino acids with non-naturally occurring amino acid residues, or additions of non-naturally occurring amino acid residues. “Derivatives” of a protein also encompass peptides, oligopeptides, polypeptides which comprise naturally occurring altered (glycosylated, acylated, prenylated, phosphorylated, myristoylated, sulphated etc.) or non-naturally altered amino acid residues compared to the amino acid sequence of a naturally-occurring form of the polypeptide. A derivative may also comprise one or more non-amino acid substituents or additions compared to the amino acid sequence from which it is derived, for example a reporter molecule or other ligand, covalently or non-covalently bound to the amino acid sequence, such as a reporter molecule which is bound to facilitate its detection, and non-naturally occurring amino acid residues relative to the amino acid sequence of a naturally-occurring protein. Furthermore, “derivatives” also include fusions of the naturally-occurring form of the protein with tagging peptides such as FLAG, HIS6 or thioredoxin (for a review of tagging peptides, see Terpe, Appl. Microbiol. Biotechnol. 60, 523-533, 2003).

### Orthologue(s)/Paralogue(s)

[0031] Orthologues and paralogues encompass evolutionary concepts used to describe the ancestral relationships of genes. Paralogues are genes within the same species that have originated through duplication of an ancestral gene; orthologues are genes from different organisms that have originated through speciation, and are also derived from a common ancestral gene.

### Domain, Motif/Consensus Sequence/Signature

[0032] The term “domain” refers to a set of amino acids conserved at specific positions along an alignment of sequences of evolutionarily related proteins. While amino acids at other positions can vary between homologues, amino acids that are highly conserved at specific positions indicate amino acids that are likely essential in the structure, stability or function of a protein. Identified by their high degree of conservation in aligned sequences of a family of protein homologues, they can be used as identifiers to determine if any polypeptide in question belongs to a previously identified polypeptide family.

[0033] The term “motif” or “consensus sequence” or “signature” refers to a short conserved region in the sequence of evolutionarily related proteins. Motifs are frequently highly conserved parts of domains, but may also include only part of the domain, or be located outside of conserved domain (if all of the amino acids of the motif fall outside of a defined domain).

[0034] Specialist databases exist for the identification of domains, for example, SMART (Schultz et al. (1998) Proc. Natl. Acad. Sci. USA 95, 5857-5864; Letunic et al. (2002) Nucleic Acids Res 30, 242-244), InterPro (Mulder et al., (2003) Nucl. Acids. Res. 31, 315-318), Prosite (Bucher and Bairoch (1994), A generalized profile syntax for biomolecular sequences motifs and its function in automatic sequence interpretation. (In) ISMB-94; Proceedings 2nd International Conference on Intelligent Systems for Molecular Biology. Altman R., Brutlag D., Karp P., Lathrop R., Searls D., Eds., pp 53-61, AAAI Press, Menlo Park; Hulo et al., Nucl. Acids. Res. 32:D134-D137, (2004)), or Pfam (Bateman et al., Nucleic Acids Research 30(1): 276-280 (2002)). A set of tools for in silico analysis of protein sequences is available on the ExPASy proteomics server (Swiss Institute of Bioinformatics (Gasteiger et al., ExPASy: the proteomics server for in-depth protein knowledge and analysis, Nucleic Acids Res. 31:3784-3788 (2003)). Domains or motifs may also be identified using routine techniques, such as by sequence alignment.

[0035] Methods for the alignment of sequences for comparison are well known in the art, such methods include GAP, BESTFIT, BLAST, FASTA and TFASTA. GAP uses the algorithm of Needleman and Wunsch ((1970) J Mol Biol 48: 443-453) to find the global (i.e. spanning the complete sequences) alignment of two sequences that maximizes the number of matches and minimizes the number of gaps. The BLAST algorithm (Altschul et al. (1990) J Mol Biol 215: 403-10) calculates percent sequence identity and performs a statistical analysis of the similarity between the two sequences. The software for performing BLAST analysis is publicly available through the National Centre for Biotechnology Information (NCBI). Homologues may readily be identified using, for example, the ClustalW multiple sequence alignment algorithm (version 1.83), with the default pairwise alignment parameters, and a scoring method in percentage. Global percentages of similarity and identity may also be determined using one of the methods available in the MatGAT software package (Campanella et al., BMC Bioinformatics. 2003 Jul. 10; 4:29. MatGAT: an application that generates similarity/identity matrices using protein or DNA sequences.). Minor manual editing may be performed to optimise alignment between conserved motifs, as would be apparent to a person skilled in the art. Furthermore, instead of using full-length sequences for the identification of homologues, specific domains may also be used. The sequence identity values may be determined over the entire nucleic acid or amino acid sequence or over selected domains or conserved motif(s), using the programs mentioned above using the default parameters. For local alignments, the Smith-Waterman algorithm is particularly useful (Smith T F, Waterman M S (1981) J. Mol. Biol 147(1); 195-7).

### Reciprocal BLAST

[0036] Typically, this involves a first BLAST involving BLASTing a query sequence (for example using any of the sequences listed in Table A of the Examples section) against any sequence database, such as the publicly available NCBI database. BLASTN or TBLASTX (using standard default values) are generally used when starting from a nucleotide sequence, and BLASTP or TBLASTN (using standard default values) when starting from a protein sequence. The BLAST results may optionally be filtered. The full-length sequences of either the filtered results or non-filtered results are then BLASTed back (second BLAST) against sequences from the organism from which the query sequence is derived. The results of the first and second BLASTs are then compared. A paralogue is identified if a high-ranking hit from the first blast is from the same species as from which the query sequence is derived, a BLAST back then ideally results in the query sequence amongst the highest hits; an orthologue is identified if a high-ranking hit in the first BLAST is not from the same species as from which the query sequence is derived, and preferably results upon BLAST back in the query sequence being among the highest hits.

[0037] High-ranking hits are those having a low E-value. The lower the E-value, the more significant the score (or in other words the lower the chance that the hit was found by chance). Computation of the E-value is well known in the art. In addition to E-values, comparisons are also scored by percentage identity. Percentage identity refers to the number of identical nucleotides (or amino acids) between the two compared nucleic acid (or polypeptide) sequences over a particular length. In the case of large families, ClustalW may be used, followed by a neighbour joining tree, to help visualize clustering of related genes and to identify orthologues and paralogues.

### Hybridisation

[0038] The term “hybridisation” as defined herein is a process wherein substantially homologous complementary nucleotide sequences anneal to each other. The hybridisation process can occur entirely in solution, i.e. both complementary nucleic acids are in solution. The hybridisation process can also occur with one of the complementary nucleic acids immobilised to a matrix such as magnetic beads, Sepharose beads or any other resin. The hybridisation process can furthermore occur with one of the complementary nucleic acids immobilised to a solid support such as a nitro-cellulose or nylon membrane or immobilised by e.g. photolithography to, for example, a siliceous glass support (the latter known as nucleic acid arrays or microarrays or as nucleic acid chips). In order to allow hybridisation to occur, the nucleic acid molecules are generally thermally or chemically denatured to melt a double strand into two single strands and/or to remove hairpins or other secondary structures from single stranded nucleic acids.

[0039] The term “stringency” refers to the conditions under which a hybridisation takes place. The stringency of hybridisation is influenced by conditions such as temperature, salt concentration, ionic strength and hybridisation buffer composition. Generally, low stringency conditions are selected to be about 30° C. lower than the thermal melting point (Tₘ) for the specific sequence at a defined ionic strength and pH. Medium stringency conditions are when the temperature is 20° C. below Tₘ, and high stringency conditions are when the temperature is 10° C. below Tₘ. High stringency hybridisation conditions are typically used for isolating hybridising sequences that have high sequence similarity to the target nucleic acid sequence. However, nucleic acids may deviate in sequence and still encode a substantially identical polypeptide, due to the degeneracy of the genetic code. Therefore medium stringency hybridisation conditions may sometimes be needed to identify such nucleic acid molecules.

[0040] The Tₘ is the temperature under defined ionic strength and pH, at which 50% of the target sequence hybridises to a perfectly matched probe. The Tₘ is dependent upon the solution conditions and the base composition and length of the probe. For example, longer sequences hybridise specifically at higher temperatures. The maximum rate of hybridisation is obtained from about 16° C. up to 32° C. below Tₘ. The presence of monovalent cations in the hybridisation solution reduce the electrostatic repulsion between the two nucleic acid strands thereby promoting hybrid formation; this effect is visible for sodium concentrations of up to 0.4M (for higher concentrations, this effect may be ignored). Formamide reduces the melting temperature of DNA-DNA and DNA-RNA duplexes with 0.6 to 0.7° C. for each percent formamide, and addition of 50% formamide allows hybridisation to be performed at 30 to 45° C., though the rate of hybridisation will be lowered. Base pair mismatches reduce the hybridisation rate and the thermal stability of the duplexes. On average and for large probes, the Tm decreases about 1° C. per % base mismatch. The Tₘ may be calculated using the following equations, depending on the types of hybrids:

[0041] 1) DNA-DNA hybrids (Meinkoth and Wahl, Anal. Biochem., 138: 267-284, 1984):
[0042] Tₘ=81.5° C.+16.6×log₁₀[Na⁺]^{a}+0.41×%[G/C^{b}]−500×[L^{c}]⁻¹−0.61×% formamide

[0043] 2) DNA-RNA or RNA-RNA hybrids:
[0044] Tₘ=79.8° C.+18.5 (log₁₀[Na⁺]^{a})+0.58 (% G/C^{b})+11.8 (% G/C^{b})²−820/L^{c}

[0045] 3) oligo-DNA or oligo-RNAs hybrids:
[0046] For <20 nucleotides: Tₘ=2 (lₙ)
[0047] For 20-35 nucleotides: Tₘ=22+1.46 (lₙ)
   ^{a} or for other monovalent cation, but only accurate in the 0.01-0.4 M range.
   ^{b} only accurate for % GC in the 30% to 75% range.
   ^{c} L=length of duplex in base pairs.
   ^{d} oligo, oligonucleotide; lₙ=effective length of primer=2×(no. of G/C)+(no. of A/T).

[0048] Non-specific binding may be controlled using any one of a number of known techniques such as, for example, blocking the membrane with protein containing solutions, additions of heterologous RNA, DNA, and SDS to the hybridisation buffer, and treatment with Rnase. For non-homologous probes, a series of hybridizations may be performed by varying one of (i) progressively lowering the annealing temperature (for example from 68° C. to 42° C.) or (ii) progressively lowering the formamide concentration (for example from 50% to 0%). The skilled artisan is aware of various parameters which may be altered during hybridisation and which will either maintain or change the stringency conditions.

[0049] Besides the hybridisation conditions, specificity of hybridisation typically also depends on the function of post-hybridisation washes. To remove background resulting from non-specific hybridisation, samples are washed with dilute salt solutions. Critical factors of such washes include the ionic strength and temperature of the final wash solution: the lower the salt concentration and the higher the wash temperature, the higher the stringency of the wash. Wash conditions are typically performed at or below hybridisation stringency. A positive hybridisation gives a signal that is at least twice of that of the background. Generally, suitable stringent conditions for nucleic acid hybridisation assays or gene amplification detection procedures are as set forth above. More or less stringent conditions may also be selected. The skilled artisan is aware of various parameters which may be altered during washing and which will either maintain or change the stringency conditions.

[0050] For example, typical high stringency hybridisation conditions for DNA hybrids longer than 50 nucleotides encompass hybridisation at 65° C. in 1×SSC or at 42° C. in 1×SSC and 50% formamide, followed by washing at 65° C. in 0.3×SSC. Examples of medium stringency hybridisation conditions for DNA hybrids longer than 50 nucleotides encompass hybridisation at 50° C. in 4×SSC or at 40° C. in 6×SSC and 50% formamide, followed by washing at 50° C. in 2×SSC. The length of the hybrid is the anticipated length for the hybridising nucleic acid. When nucleic acids of known sequence are hybridised, the hybrid length may be determined by aligning the sequences and identifying the conserved regions described herein. 1×SSC is 0.15M NaCl and 15 mM sodium citrate; the hybridisation solution and wash solutions may additionally include 5×Denhardt's reagent, 0.5-1.0% SDS, 100 μg/ml denatured, fragmented salmon sperm DNA, 0.5% sodium pyrophosphate.

[0051] For the purposes of defining the level of stringency, reference can be made to Sambrook et al. (2001) Molecular Cloning: a laboratory manual, 3^{rd} Edition, Cold Spring Harbor Laboratory Press, CSH, New York or to Current Protocols in Molecular Biology, John Wiley & Sons, N.Y. (1989 and yearly updates).

### Splice Variant

[0052] The term “splice variant” as used herein encompasses variants of a nucleic acid sequence in which selected introns and/or exons have been excised, replaced, displaced or added, or in which introns have been shortened or lengthened. Such variants will be ones in which the biological activity of the protein is substantially retained; this may be achieved by selectively retaining functional segments of the protein. Such splice variants may be found in nature or may be manmade. Methods for predicting and isolating such splice variants are well known in the art (see for example Foissac and Schiex (2005) BMC Bioinformatics 6: 25).

### Allelic Variant

[0053] Alleles or allelic variants are alternative forms of a given gene, located at the same chromosomal position. Allelic variants encompass Single Nucleotide Polymorphisms (SNPs), as well as Small Insertion/Deletion Polymorphisms (INDELs). The size of INDELs is usually less than 100 bp. SNPs and INDELs form the largest set of sequence variants in naturally occurring polymorphic strains of most organisms.

### Endogenous Gene

[0054] Reference herein to an “endogenous” gene not only refers to the gene in question as found in a plant in its natural form (i.e., without there being any human intervention), but also refers to that same gene (or a substantially homologous nucleic acid/gene) in an isolated form subsequently (re)introduced into a plant (a transgene). For example, a transgenic plant containing such a transgene may encounter a substantial reduction of the transgene expression and/or substantial reduction of expression of the endogenous gene. The isolated gene may be isolated from an organism or may be manmade, for example by chemical synthesis.

### Gene Shuffling/Directed Evolution

[0055] Gene shuffling or directed evolution consists of iterations of DNA shuffling followed by appropriate screening and/or selection to generate variants of nucleic acids or portions thereof encoding proteins having a modified biological activity (Castle et al., (2004) Science 304(5674): 1151-4; U.S. Pat. Nos. 5,811,238 and 6,395,547).

### Construct

[0056] Additional regulatory elements may include transcriptional as well as translational enhancers. Those skilled in the art will be aware of terminator and enhancer sequences that may be suitable for use in performing the invention. An intron sequence may also be added to the 5′ untranslated region (UTR) or in the coding sequence to increase the amount of the mature message that accumulates in the cytosol, as described in the definitions section. Other control sequences (besides promoter, enhancer, silencer, intron sequences, 3′UTR and/or 5′UTR regions) may be protein and/or RNA stabilizing elements. Such sequences would be known or may readily be obtained by a person skilled in the art.

[0057] The genetic constructs of the invention may further include an origin of replication sequence that is required for maintenance and/or replication in a specific cell type. One example is when a genetic construct is required to be maintained in a bacterial cell as an episomal genetic element (e.g. plasmid or cosmid molecule). Preferred origins of replication include, but are not limited to, the f1-ori and colE1.

[0058] For the detection of the successful transfer of the nucleic acid sequences as used in the methods of the invention and/or selection of transgenic plants comprising these nucleic acids, it is advantageous to use marker genes (or reporter genes). Therefore, the genetic construct may optionally comprise a selectable marker gene. Selectable markers are described in more detail in the “definitions” section herein. The marker genes may be removed or excised from the transgenic cell once they are no longer needed. Techniques for marker removal are known in the art, useful techniques are described above in the definitions section.

### Regulatory Element/Control Sequence/Promoter

[0059] The terms “regulatory element”, “control sequence” and “promoter” are all used interchangeably herein and are to be taken in a broad context to refer to regulatory nucleic acid sequences capable of effecting expression of the sequences to which they are ligated. The term “promoter” typically refers to a nucleic acid control sequence located upstream from the transcriptional start of a gene and which is involved in recognising and binding of RNA polymerase and other proteins, thereby directing transcription of an operably linked nucleic acid. Encompassed by the aforementioned terms are transcriptional regulatory sequences derived from a classical eukaryotic genomic gene (including the TATA box which is required for accurate transcription initiation, with or without a CCAAT box sequence) and additional regulatory elements (i.e. upstream activating sequences, enhancers and silencers) which alter gene expression in response to developmental and/or external stimuli, or in a tissue-specific manner. Also included within the term is a transcriptional regulatory sequence of a classical prokaryotic gene, in which case it may include a −35 box sequence and/or −10 box transcriptional regulatory sequences. The term “regulatory element” also encompasses a synthetic fusion molecule or derivative that confers, activates or enhances expression of a nucleic acid molecule in a cell, tissue or organ.

[0060] A “plant promoter” comprises regulatory elements, which mediate the expression of a coding sequence segment in plant cells. Accordingly, a plant promoter need not be of plant origin, but may originate from viruses or micro-organisms, for example from viruses which attack plant cells. The “plant promoter” can also originate from a plant cell, e.g. from the plant which is transformed with the nucleic acid sequence to be expressed in the inventive process and described herein. This also applies to other “plant” regulatory signals, such as “plant” terminators. The promoters upstream of the nucleotide sequences useful in the methods of the present invention can be modified by one or more nucleotide substitution(s), insertion(s) and/or deletion(s) without interfering with the functionality or activity of either the promoters, the open reading frame (ORF) or the 3′-regulatory region such as terminators or other 3′ regulatory regions which are located away from the ORF. It is furthermore possible that the activity of the promoters is increased by modification of their sequence, or that they are replaced completely by more active promoters, even promoters from heterologous organisms. For expression in plants, the nucleic acid molecule must, as described above, be linked operably to or comprise a suitable promoter which expresses the gene at the right point in time and with the required spatial expression pattern.

[0061] For the identification of functionally equivalent promoters, the promoter strength and/or expression pattern of a candidate promoter may be analysed for example by operably linking the promoter to a reporter gene and assaying the expression level and pattern of the reporter gene in various tissues of the plant. Suitable well-known reporter genes include for example beta-glucuronidase or beta-galactosidase. The promoter activity is assayed by measuring the enzymatic activity of the beta-glucuronidase or beta-galactosidase. The promoter strength and/or expression pattern may then be compared to that of a reference promoter (such as the one used in the methods of the present invention). Alternatively, promoter strength may be assayed by quantifying mRNA levels or by comparing mRNA levels of the nucleic acid used in the methods of the present invention, with mRNA levels of housekeeping genes such as 18S rRNA, using methods known in the art, such as Northern blotting with densitometric analysis of autoradiograms, quantitative real-time PCR or RT-PCR (Heid et al., 1996 Genome Methods 6: 986-994). Generally by “weak promoter” is intended a promoter that drives expression of a coding sequence at a low level. By “low level” is intended at levels of about 1/10,000 transcripts to about 1/100,000 transcripts, to about 1/500,0000 transcripts per cell. Conversely, a “strong promoter” drives expression of a coding sequence at high level, or at about 1/10 transcripts to about 1/100 transcripts to about 1/1000 transcripts per cell. Generally, by “medium strength promoter” is intended a promoter that drives expression of a coding sequence at a lower level than a strong promoter, in particular at a level that is in all instances below that obtained when under the control of a 35S CaMV promoter.

### Operably Linked

[0062] The term “operably linked” as used herein refers to a functional linkage between the promoter sequence and the gene of interest, such that the promoter sequence is able to initiate transcription of the gene of interest.

### Constitutive Promoter

[0063] A “constitutive promoter” refers to a promoter that is transcriptionally active during most, but not necessarily all, phases of growth and development and under most environmental conditions, in at least one cell, tissue or organ. Table 2a below gives examples of constitutive promoters.

TABLE 2a
Examples of constitutive promoters

| Gene Source | Reference |
|---|---|
| Actin | McElroy et al, Plant Cell, 2: 163-171, 1990 |
| HMGP | WO 2004/070039 |
| CAMV 35S | Odell et al, Nature, 313: 810-812, 1985 |
| CaMV 19S | Nilsson et al., Physiol. Plant. 100:456-462, 1997 |
| GOS2 | de Pater et al, Plant J Nov;2(6):837-44, 1992, |
| | WO 2004/065596 |
| Ubiquitin | Christensen et al, Plant Mol. Biol. 18: 675-689, 1992 |
| Rice cyclophilin | Buchholz et al, Plant Mol Biol. 25(5): 837-43, 1994 |
| Maize H3 histone | Lepetit et al, Mol. Gen. Genet. 231:276-285, 1992 |
| Alfalfa H3 histone | Wu et al. Plant Mol. Biol. 11:641-649, 1988 |
| Actin 2 | An et al, Plant J. 10(1); 107-121, 1996 |
| 34S FMV | Sanger et al., Plant. Mol. Biol., 14, 1990: 433-443 |
| Rubisco small | US 4,962,028 |
| subunit | |
| OCS | Leisner (1988) Proc Natl Acad Sci USA 85(5): 2553 |
| SAD1 | Jain et al., Crop Science, 39 (6), 1999: 1696 |
| SAD2 | Jain et al., Crop Science, 39 (6), 1999: 1696 |
| nos | Shaw et al. (1984) Nucleic Acids Res. 12(20):7831-7846 |
| V-ATPase | WO 01/14572 |
| Super promoter | WO 95/14098 |
| G-box proteins | WO 94/12015 |

### Ubiquitous Promoter

[0064] A ubiquitous promoter is active in substantially all tissues or cells of an organism.

### Developmentally-Regulated Promoter

[0065] A developmentally-regulated promoter is active during certain developmental stages or in parts of the plant that undergo developmental changes.

### Inducible Promoter

[0066] An inducible promoter has induced or increased transcription initiation in response to a chemical (for a review see Gatz 1997, Annu. Rev. Plant Physiol. Plant Mol. Biol., 48:89-108), environmental or physical stimulus, or may be “stress-inducible”, i.e. activated when a plant is exposed to various stress conditions, or a “pathogen-inducible” i.e. activated when a plant is exposed to exposure to various pathogens.

[0067] Organ-Specific/Tissue-Specific Promoter

[0068] An organ-specific or tissue-specific promoter is one that is capable of preferentially initiating transcription in certain organs or tissues, such as the leaves, roots, seed tissue etc. For example, a “root-specific promoter” is a promoter that is transcriptionally active predominantly in plant roots, substantially to the exclusion of any other parts of a plant, whilst still allowing for any leaky expression in these other plant parts. Promoters able to initiate transcription in certain cells only are referred to herein as “cell-specific”.

[0069] Examples of root-specific promoters are listed in Table 2b below:

TABLE 2b
Examples of root-specific promoters

| Gene Source | Reference |
|---|---|
| RCc3 | Plant Mol Biol. 1995 January; 27(2):237-48 |
| Arabidopsis PHT1 | Koyama et al. J Biosci Bioeng. 2005 January; 99(1): |
| | 38-42.; Mudge et al. (2002, Plant J. 31: 341) |
| Medicago phosphate transporter | Xiao et al., 2006, Plant Biol (Stuttg). 2006 Jul; 8(4): |
| | 439-49 |
| Arabidopsis Pyk10 | Nitz et al. (2001) Plant Sci 161(2): 337-346 |
| root-expressible genes | Tingey et al., EMBO J. 6: 1, 1987. |
| tobacco auxin-inducible gene | Van der Zaal et al., Plant Mol. Biol. 16, 983, 1991. |
| β-tubulin | Oppenheimer, et al., Gene 63: 87, 1988. |
| tobacco root-specific genes | Conkling, et al., Plant Physiol. 93: 1203, 1990. |
| B. napus G1-3b gene | U. S. Pat. No. 5, 401, 836 |
| SbPRP1 | Suzuki et al., Plant Mol. Biol. 21: 109-119, 1993. |
| LRX1 | Baumberger et al. 2001, Genes & Dev. 15:1128 |
| BTG-26 Brassica napus | US 20050044585 |
| LeAMT1 (tomato) | Lauter et al. (1996, PNAS 3: 8139) |
| The LeNRT1-1 (tomato) | Lauter et al. (1996, PNAS 3: 8139) |
| class I patatin gene (potato) | Liu et al., Plant Mol. Biol. 17 (6): 1139-1154 |
| KDC1 (Daucus carota) | Downey et al. (2000, J. Biol. Chem. 275: 39420) |
| TobRB7 gene | W Song (1997) PhD Thesis, North Carolina State |
| | University, Raleigh, NC USA |
| OsRAB5a (rice) | Wang et al. 2002, Plant Sci. 163: 273 |
| ALF5 (Arabidopsis) | Diener et al. (2001, Plant Cell 13: 1625) |
| NRT2;1Np (N. plumbaginifolia) | Quesada et al. (1997, Plant Mol. Biol. 34: 265) |

[0070] A seed-specific promoter is transcriptionally active predominantly in seed tissue, but not necessarily exclusively in seed tissue (in cases of leaky expression). The seed-specific promoter may be active during seed development and/or during germination. The seed specific promoter may be endosperm/aleurone/embryo specific. Examples of seed-specific promoters (endosperm/aleurone/embryo specific) are shown in Table 2c to Table 2f below. Further examples of seed-specific promoters are given in Qing Qu and Takaiwa (Plant Biotechnol. J. 2, 113-125, 2004), which disclosure is incorporated by reference herein as if fully set forth.

TABLE 2c
Examples of seed-specific promoters

| Gene source | Reference |
|---|---|
| seed-specific | Simon et al., Plant Mol. Biol. 5: 191, 1985; |
| genes | Scofield et al., J. Biol. Chem. 262: 12202, 1987.; |
| | Baszczynski et al., Plant Mol. Biol. 14: 633, 1990. |
| Brazil Nut | Pearson et al., Plant Mol. Biol. 18: 235-245, 1992. |
| albumin | |
| legumin | Ellis et al., Plant Mol. Biol. 10: 203-214, 1988. |
| glutelin (rice) | Takaiwa et al., Mol. Gen. Genet. 208: 15-22, 1986; |
| | Takaiwa et al., FEBS Letts. 221: 43-47, 1987. |
| zein | Matzke et al Plant Mol Biol, 14(3): 323-32 1990 |
| napA | Stalberg et al, Planta 199: 515-519, 1996. |
| wheat LMW | Mol Gen Genet 216: 81-90, 1989; |
| and HMW | NAR 17: 461-2, 1989 |
| glutenin-1 | |
| wheat SPA | Albani et al, Plant Cell, 9: 171-184, 1997 |
| wheat α, β, | EMBO J. 3: 1409-15, 1984 |
| γ-gliadins | |
| barley Itr1 | Diaz et al. (1995) Mol Gen Genet 248(5): 592-8 |
| promoter | |
| barley B1, C, D, | Theor Appl Gen 98: 1253-62, 1999; |
| hordein | Plant J 4: 343-55, 1993; Mol Gen Genet |
| | 250: 750-60, 1996 |
| barley DOF | Mena et al, The Plant Journal, 116(1): 53-62, 1998 |
| blz2 | EP99106056.7 |
| synthetic promoter | Vicente-Carbajosa et al., Plant J. 13: 629-640, 1998. |
| rice prolamin | Wu et al, Plant Cell Physiology 39(8) 885-889, 1998 |
| NRP33 | |
| rice a-globulin | Wu et al, Plant Cell Physiology 39(8) 885-889, 1998 |
| Glb-1 | |
| rice OSH1 | Sato et al, Proc. Natl. Acad. Sci. USA, 93: |
| | 8117-8122, 1996 |
| rice α-globulin | Nakase et al. Plant Mol. Biol. 33: 513-522, 1997 |
| REB/OHP-1 | |
| rice ADP-glucose | Trans Res 6: 157-68, 1997 |
| pyrophosphorylase | |
| maize ESR | Plant J 12: 235-46, 1997 |
| gene family | |
| sorghum α-kafirin | DeRose et al., Plant Mol. Biol 32: 1029-35, 1996 |
| KNOX | Postma-Haarsma et al, Plant Mol. |
| | Biol. 39: 257-71, 1999 |
| rice oleosin | Wu et al, J. Biochem. 123: 386, 1998 |
| sunflower oleosin | Cummins et al., Plant Mol. Biol. 19: 873-876, 1992 |
| PRO0117, | WO 2004/070039 |
| putative rice 40S | |
| ribosomal protein | |
| PRO0136, | unpublished |
| rice alanine | |
| aminotransferase | |
| PRO0147, | unpublished |
| trypsin inhibitor | |
| ITR1 (barley) | |
| PRO0151, | WO 2004/070039 |
| rice WSI18 | |
| PRO0175, | WO 2004/070039 |
| rice RAB21 | |
| PRO005 | WO 2004/070039 |
| PRO0095 | WO 2004/070039 |
| α-amylase | Lanahan et al, Plant Cell 4: 203-211, |
| (Amy32b) | 1992; Skriver et al, |
| | Proc Natl Acad Sci USA 88: 7266-7270, 1991 |
| cathepsin | Cejudo et al, Plant Mol Biol 20: 849-856, 1992 |
| β-like gene | |
| Barley Ltp2 | Kalla et al., Plant J. 6: 849-60, 1994 |
| Chi26 | Leah et al., Plant J. 4: 579-89, 1994 |
| Maize B-Peru | Selinger et al., Genetics 149; 1125-38,1998 |

TABLE 2d
examples of endosperm-specific promoters

| Gene source | Reference |
|---|---|
| glutelin (rice) | Takaiwa et al. (1986) Mol Gen Genet 208: 15-22; |
| | Takaiwa et al. (1987) FEBS Letts. 221: 43-47 |
| zein | Matzke et al., (1990) Plant Mol Biol 14(3): 323-32 |
| wheat LMW and HMW glutenin-1 | Colot et al. (1989) Mol Gen Genet 216: 81-90, |
| | Anderson et al. (1989) NAR 17: 461-2 |
| wheat SPA | Albani et al. (1997) Plant Cell 9: 171-184 |
| wheat gliadins | Rafalski et al. (1984) EMBO 3: 1409-15 |
| barley Itr1 promoter | Diaz et al. (1995) Mol Gen Genet 248(5): 592-8 |
| barley B1, C, D, hordein | Cho et al. (1999) Theor Appl Genet 98: 1253-62; |
| | Muller et al. (1993) Plant J 4: 343-55; |
| | Sorenson et al. (1996) Mol ,Gen Genet 250: |
| | 750-60 |
| barley DOF | Mena et al, (1998) Plant J 116(1): 53-62 |
| blz2 | Onate et al. (1999) J Biol Chem 274(14): 9175-82 |
| synthetic promoter | Vicente-Carbajosa et al. (1998) Plant J 13: 629-640 |
| rice prolamin NRP33 | Wu et al, (1998) Plant Cell Physiol 39(8) 885-889 |
| rice globulin Glb-1 | Wu et al. (1998) Plant Cell Physiol 39(8) 885-889 |
| rice globulin REB/OHP-1 | Nakase et al. (1997) Plant Molec Biol 33: 513-522 |
| rice ADP-glucose pyrophosphorylase | Russell et al. (1997) Trans Res 6: 157-68 |
| maize ESR gene family | Opsahl-Ferstad et al. (1997) Plant J 12: 235-46 |
| sorghum kafirin | DeRose et al. (1996) Plant Mol Biol 32: 1029-35 |

TABLE 2e
Examples of embryo specific promoters:

| Gene source | Reference |
|---|---|
| rice OSH1 | Sato et al, Proc. Natl. Acad. Sci. USA, 93: 8117-8122, |
| | 1996 |
| KNOX | Postma-Haarsma et al, Plant Mol. Biol. 39: 257-71, 1999 |
| PRO0151 | WO 2004/070039 |
| PRO0175 | WO 2004/070039 |
| PRO005 | WO 2004/070039 |
| PRO0095 | WO 2004/070039 |

TABLE 2f
Examples of aleurone-specific promoters

| Gene source | Reference |
|---|---|
| α-amylase | Lanahan et al, Plant Cell 4: 203-211, 1992; |
| (Amy32b) | Skriver et al, Proc Natl Acad Sci USA 88: 7266-7270, |
| | 1991 |
| cathepsin | Cejudo et al, Plant Mol Biol 20: 849-856, 1992 |
| β-like gene | |
| Barley Ltp2 | Kalla et al., Plant J. 6: 849-60, 1994 |
| Chi26 | Leah et al., Plant J. 4: 579-89, 1994 |
| Maize B-Peru | Selinger et al., Genetics 149; 1125-38,1998 |

[0071] A green tissue-specific promoter as defined herein is a promoter that is transcriptionally active predominantly in green tissue, substantially to the exclusion of any other parts of a plant, whilst still allowing for any leaky expression in these other plant parts.

[0072] Examples of green tissue-specific promoters which may be used to perform the methods of the invention are shown in Table 2g below.

TABLE 2g
Examples of green tissue-specif c promoters

| Gene | Expression | Reference |
|---|---|---|
| Maize Orthophosphate dikinase | Leaf specific | Fukavama et al., Plant Physiol. |
| | | 2001 Nov; 127(3): 1136-46 |
| Maize Phosphoenolpyruvate | Leaf specific | Kausch et al., Plant Mol Biol. |
| carboxylase | | 2001 Jan; 45(1): 1-15 |
| Rice Phosphoenolpyruvate carboxylase | Leaf specific | Lin et al., 2004 DNA Seq. |
| | | 2004 Aug; 15(4): 269-76 |
| Rice small subunit Rubisco | Leaf specific | Nomura et al., Plant Mol Biol. |
| | | 2000 Sep; 44(1): 99-106 |
| rice beta expansin EXBP9 | Shoot specific | WO 2004/070039 |
| Pigeonpea small subunit Rubisco | Leaf specific | Panguluri et al., Indian J Exp |
| | | Biol. 2005 Apr; 43(4): 369-72 |
| Pea RBCS3A | Leaf specific | |

[0073] Another example of a tissue-specific promoter is a meristem-specific promoter, which is transcriptionally active predominantly in meristematic tissue, substantially to the exclusion of any other parts of a plant, whilst still allowing for any leaky expression in these other plant parts. Examples of green meristem-specific promoters which may be used to perform the methods of the invention are shown in Table 2h below.

TABLE 2h
Examples of meristem-specific promoters

| Gene source | Expression pattern | Reference |
|---|---|---|
| rice OSH1 | Shoot apical meristem, | Sato et al. (1996) Proc. Natl. Acad. |
| | from embryo globular stage | Sci. USA, 93: 8117-8122 |
| | to seedling stage | |
| Rice metallothionein | Meristem specific | BAD87835.1 |
| WAK1 & WAK 2 | Shoot and root apical | Wagner & Kohorn (2001) Plant Cell |
| | meristems, and in | 13(2): 303-318 |
| | expanding leaves and | |
| | sepals | |

### Terminator

[0074] The term “terminator” encompasses a control sequence which is a DNA sequence at the end of a transcriptional unit which signals 3′ processing and polyadenylation of a primary transcript and termination of transcription. The terminator can be derived from the natural gene, from a variety of other plant genes, or from T-DNA. The terminator to be added may be derived from, for example, the nopaline synthase or octopine synthase genes, or alternatively from another plant gene, or less preferably from any other eukaryotic gene.

### Selectable Marker (Gene)/Reporter Gene

[0075] “Selectable marker”, “selectable marker gene” or “reporter gene” includes any gene that confers a phenotype on a cell in which it is expressed to facilitate the identification and/or selection of cells that are transfected or transformed with a nucleic acid construct of the invention. These marker genes enable the identification of a successful transfer of the nucleic acid molecules via a series of different principles. Suitable markers may be selected from markers that confer antibiotic or herbicide resistance, that introduce a new metabolic trait or that allow visual selection. Examples of selectable marker genes include genes conferring resistance to antibiotics (such as nptII that phosphorylates neomycin and kanamycin, or hpt, phosphorylating hygromycin, or genes conferring resistance to, for example, bleomycin, streptomycin, tetracyclin, chloramphenicol, ampicillin, gentamycin, geneticin (G418), spectinomycin or blasticidin), to herbicides (for example bar which provides resistance to Basta®; aroA or gox providing resistance against glyphosate, or the genes conferring resistance to, for example, imidazolinone, phosphinothricin or sulfonylurea), or genes that provide a metabolic trait (such as manA that allows plants to use mannose as sole carbon source or xylose isomerase for the utilisation of xylose, or antinutritive markers such as the resistance to 2-deoxyglucose). Expression of visual marker genes results in the formation of colour (for example β-glucuronidase, GUS or β-galactosidase with its coloured substrates, for example X-Gal), luminescence (such as the luciferin/luceferase system) or fluorescence (Green Fluorescent Protein, GFP, and derivatives thereof). This list represents only a small number of possible markers. The skilled worker is familiar with such markers. Different markers are preferred, depending on the organism and the selection method.

[0076] It is known that upon stable or transient integration of nucleic acids into plant cells, only a minority of the cells takes up the foreign DNA and, if desired, integrates it into its genome, depending on the expression vector used and the transfection technique used. To identify and select these integrants, a gene coding for a selectable marker (such as the ones described above) is usually introduced into the host cells together with the gene of interest. These markers can for example be used in mutants in which these genes are not functional by, for example, deletion by conventional methods. Furthermore, nucleic acid molecules encoding a selectable marker can be introduced into a host cell on the same vector that comprises the sequence encoding the polypeptides of the invention or used in the methods of the invention, or else in a separate vector. Cells which have been stably transfected with the introduced nucleic acid can be identified for example by selection (for example, cells which have integrated the selectable marker survive whereas the other cells die).

[0077] Since the marker genes, particularly genes for resistance to antibiotics and herbicides, are no longer required or are undesired in the transgenic host cell once the nucleic acids have been introduced successfully, the process according to the invention for introducing the nucleic acids advantageously employs techniques which enable the removal or excision of these marker genes. One such a method is what is known as co-transformation. The co-transformation method employs two vectors simultaneously for the transformation, one vector bearing the nucleic acid according to the invention and a second bearing the marker gene(s). A large proportion of transformants receives or, in the case of plants, comprises (up to 40% or more of the transformants), both vectors. In case of transformation with Agrobacteria, the transformants usually receive only a part of the vector, i.e. the sequence flanked by the T-DNA, which usually represents the expression cassette. The marker genes can subsequently be removed from the transformed plant by performing crosses. In another method, marker genes integrated into a transposon are used for the transformation together with desired nucleic acid (known as the Ac/Ds technology). The transformants can be crossed with a transposase source or the transformants are transformed with a nucleic acid construct conferring expression of a transposase, transiently or stable. In some cases (approx. 10%), the transposon jumps out of the genome of the host cell once transformation has taken place successfully and is lost. In a further number of cases, the transposon jumps to a different location. In these cases the marker gene must be eliminated by performing crosses. In microbiology, techniques were developed which make possible, or facilitate, the detection of such events. A further advantageous method relies on what is known as recombination systems; whose advantage is that elimination by crossing can be dispensed with. The best-known system of this type is what is known as the Cre/lox system. Cre1 is a recombinase that removes the sequences located between the loxP sequences. If the marker gene is integrated between the loxP sequences, it is removed once transformation has taken place successfully, by expression of the recombinase. Further recombination systems are the HIN/HIX, FLP/FRT and REP/STB system (Tribble et al., J. Biol. Chem., 275, 2000: 22255-22267; Velmurugan et al., J. Cell Biol., 149, 2000: 553-566). A site-specific integration into the plant genome of the nucleic acid sequences according to the invention is possible. Naturally, these methods can also be applied to microorganisms such as yeast, fungi or bacteria.

### Transgenic/Transgene/Recombinant

[0078] For the purposes of the invention, “transgenic”, “transgene” or “recombinant” means with regard to, for example, a nucleic acid sequence, an expression cassette, gene construct or a vector comprising the nucleic acid sequence or an organism transformed with the nucleic acid sequences, expression cassettes or vectors according to the invention, all those constructions brought about by recombinant methods in which either
[0079] (a) the nucleic acid sequences encoding proteins useful in the methods of the invention, or
[0080] (b) genetic control sequence(s) which is operably linked with the nucleic acid sequence according to the invention, for example a promoter, or
[0081] (c) a) and b)
   are not located in their natural genetic environment or have been modified by recombinant methods, it being possible for the modification to take the form of, for example, a substitution, addition, deletion, inversion or insertion of one or more nucleotide residues. The natural genetic environment is understood as meaning the natural genomic or chromosomal locus in the original plant or the presence in a genomic library. In the case of a genomic library, the natural genetic environment of the nucleic acid sequence is preferably retained, at least in part. The environment flanks the nucleic acid sequence at least on one side and has a sequence length of at least 50 bp, preferably at least 500 bp, especially preferably at least 1000 bp, most preferably at least 5000 bp. A naturally occurring expression cassette—for example the naturally occurring combination of the natural promoter of the nucleic acid sequences with the corresponding nucleic acid sequence encoding a polypeptide useful in the methods of the present invention, as defined above—becomes a transgenic expression cassette when this expression cassette is modified by non-natural, synthetic (“artificial”) methods such as, for example, mutagenic treatment. Suitable methods are described, for example, in U.S. Pat. No. 5,565,350 or WO 00/15815.

[0082] A transgenic plant for the purposes of the invention is thus understood as meaning, as above, that the nucleic acids used in the method of the invention are not present in, or originating from, the genome of said plant, or are present in the genome of said plant but not at their natural locus in the genome of said plant, it being possible for the nucleic acids to be expressed homologously or heterologously. However, as mentioned, transgenic also means that, while the nucleic acids according to the invention or used in the inventive method are at their natural position in the genome of a plant, the sequence has been modified with regard to the natural sequence, and/or that the regulatory sequences of the natural sequences have been modified. Transgenic is preferably understood as meaning the expression of the nucleic acids according to the invention at an unnatural locus in the genome, i.e. homologous or, preferably, heterologous expression of the nucleic acids takes place. Preferred transgenic plants are mentioned herein.

[0083] It shall further be noted that in the context of the present invention, the term “isolated nucleic acid” or “isolated polypeptide” may in some instances be considered as a synonym for a “recombinant nucleic acid” or a “recombinant polypeptide”, respectively and refers to a nucleic acid or polypeptide that is not located in its natural genetic environment and/or that has been modified by recombinant methods.

### Modulation

[0084] The term “modulation” means in relation to expression or gene expression, a process in which the expression level is changed by said gene expression in comparison to the control plant, the expression level may be increased or decreased. The original, unmodulated expression may be of any kind of expression of a structural RNA (rRNA, tRNA) or mRNA with subsequent translation. For the purposes of this invention, the original unmodulated expression may also be absence of any expression. The term “modulating the activity” shall mean any change of the expression of the inventive nucleic acid sequences or encoded proteins, which leads to increased yield and/or increased growth of the plants. The expression can increase from zero (absence of, or immeasurable expression) to a certain amount, or can decrease from a certain amount to immeasurable small amounts or zero.

### Expression

[0085] The term “expression” or “gene expression” means the transcription of a specific gene or specific genes or specific genetic construct. The term “expression” or “gene expression” in particular means the transcription of a gene or genes or genetic construct into structural RNA (rRNA, tRNA) or mRNA with or without subsequent translation of the latter into a protein. The process includes transcription of DNA and processing of the resulting mRNA product.

### Increased Expression/Overexpression

[0086] The term “increased expression” or “overexpression” as used herein means any form of expression that is additional to the original wild-type expression level. For the purposes of this invention, the original wild-type expression level might also be zero, i.e. absence of expression or immeasurable expression.

[0087] Methods for increasing expression of genes or gene products are well documented in the art and include, for example, overexpression driven by appropriate promoters, the use of transcription enhancers or translation enhancers. Isolated nucleic acids which serve as promoter or enhancer elements may be introduced in an appropriate position (typically upstream) of a non-heterologous form of a polynucleotide so as to upregulate expression of a nucleic acid encoding the polypeptide of interest. For example, endogenous promoters may be altered in vivo by mutation, deletion, and/or substitution (see, Kmiec, U.S. Pat. No. 5,565,350; Zarling et al., WO9322443), or isolated promoters may be introduced into a plant cell in the proper orientation and distance from a gene of the present invention so as to control the expression of the gene.

[0088] If polypeptide expression is desired, it is generally desirable to include a polyadenylation region at the 3′-end of a polynucleotide coding region. The polyadenylation region can be derived from the natural gene, from a variety of other plant genes, or from T-DNA. The 3′ end sequence to be added may be derived from, for example, the nopaline synthase or octopine synthase genes, or alternatively from another plant gene, or less preferably from any other eukaryotic gene.

[0089] An intron sequence may also be added to the 5′ untranslated region (UTR) or the coding sequence of the partial coding sequence to increase the amount of the mature message that accumulates in the cytosol. Inclusion of a spliceable intron in the transcription unit in both plant and animal expression constructs has been shown to increase gene expression at both the mRNA and protein levels up to 1000-fold (Buchman and Berg (1988) Mol. Cell biol. 8: 4395-4405; Callis et al. (1987) Genes Dev 1:1183-1200). Such intron enhancement of gene expression is typically greatest when placed near the 5′ end of the transcription unit. Use of the maize introns Adh1-S intron 1, 2, and 6, the Bronze-1 intron are known in the art. For general information see: The Maize Handbook, Chapter 116, Freeling and Walbot, Eds., Springer, N.Y. (1994).

### Decreased Expression

[0090] Reference herein to “decreased expression” or “reduction or substantial elimination” of expression is taken to mean a decrease in endogenous gene expression and/or polypeptide levels and/or polypeptide activity relative to control plants. The reduction or substantial elimination is in increasing order of preference at least 10%, 20%, 30%, 40% or 50%, 60%, 70%, 80%, 85%, 90%, or 95%, 96%, 97%, 98%, 99% or more reduced compared to that of control plants.

[0091] For the reduction or substantial elimination of expression an endogenous gene in a plant, a sufficient length of substantially contiguous nucleotides of a nucleic acid sequence is required. In order to perform gene silencing, this may be as little as 20, 19, 18, 17, 16, 15, 14, 13, 12, 11, 10 or fewer nucleotides, alternatively this may be as much as the entire gene (including the 5′ and/or 3′ UTR, either in part or in whole). The stretch of substantially contiguous nucleotides may be derived from the nucleic acid encoding the protein of interest (target gene), or from any nucleic acid capable of encoding an orthologue, paralogue or homologue of the protein of interest. Preferably, the stretch of substantially contiguous nucleotides is capable of forming hydrogen bonds with the target gene (either sense or antisense strand), more preferably, the stretch of substantially contiguous nucleotides has, in increasing order of preference, 50%, 60%, 70%, 80%, 85%, 90%, 95%, 96%, 97%, 98%, 99%, 100% sequence identity to the target gene (either sense or antisense strand). A nucleic acid sequence encoding a (functional) polypeptide is not a requirement for the various methods discussed herein for the reduction or substantial elimination of expression of an endogenous gene.

[0092] This reduction or substantial elimination of expression may be achieved using routine tools and techniques. A preferred method for the reduction or substantial elimination of endogenous gene expression is by introducing and expressing in a plant a genetic construct into which the nucleic acid (in this case a stretch of substantially contiguous nucleotides derived from the gene of interest, or from any nucleic acid capable of encoding an orthologue, paralogue or homologue of any one of the protein of interest) is cloned as an inverted repeat (in part or completely), separated by a spacer (non-coding DNA).

[0093] In such a preferred method, expression of the endogenous gene is reduced or substantially eliminated through RNA-mediated silencing using an inverted repeat of a nucleic acid or a part thereof (in this case a stretch of substantially contiguous nucleotides derived from the gene of interest, or from any nucleic acid capable of encoding an orthologue, paralogue or homologue of the protein of interest), preferably capable of forming a hairpin structure. The inverted repeat is cloned in an expression vector comprising control sequences. A non-coding DNA nucleic acid sequence (a spacer, for example a matrix attachment region fragment (MAR), an intron, a polylinker, etc.) is located between the two inverted nucleic acids forming the inverted repeat. After transcription of the inverted repeat, a chimeric RNA with a self-complementary structure is formed (partial or complete). This double-stranded RNA structure is referred to as the hairpin RNA (hpRNA). The hpRNA is processed by the plant into siRNAs that are incorporated into an RNA-induced silencing complex (RISC). The RISC further cleaves the mRNA transcripts, thereby substantially reducing the number of mRNA transcripts to be translated into polypeptides. For further general details see for example, Grierson et al. (1998) WO 98/53083; Waterhouse et al. (1999) WO 99/53050).

[0094] Performance of the methods of the invention does not rely on introducing and expressing in a plant a genetic construct into which the nucleic acid is cloned as an inverted repeat, but any one or more of several well-known “gene silencing” methods may be used to achieve the same effects.

[0095] One such method for the reduction of endogenous gene expression is RNA-mediated silencing of gene expression (downregulation). Silencing in this case is triggered in a plant by a double stranded RNA sequence (dsRNA) that is substantially similar to the target endogenous gene. This dsRNA is further processed by the plant into about 20 to about 26 nucleotides called short interfering RNAs (siRNAs). The siRNAs are incorporated into an RNA-induced silencing complex (RISC) that cleaves the mRNA transcript of the endogenous target gene, thereby substantially reducing the number of mRNA transcripts to be translated into a polypeptide. Preferably, the double stranded RNA sequence corresponds to a target gene.

[0096] Another example of an RNA silencing method involves the introduction of nucleic acid sequences or parts thereof (in this case a stretch of substantially contiguous nucleotides derived from the gene of interest, or from any nucleic acid capable of encoding an orthologue, paralogue or homologue of the protein of interest) in a sense orientation into a plant. “Sense orientation” refers to a DNA sequence that is homologous to an mRNA transcript thereof. Introduced into a plant would therefore be at least one copy of the nucleic acid sequence. The additional nucleic acid sequence will reduce expression of the endogenous gene, giving rise to a phenomenon known as co-suppression. The reduction of gene expression will be more pronounced if several additional copies of a nucleic acid sequence are introduced into the plant, as there is a positive correlation between high transcript levels and the triggering of co-suppression.

[0097] Another example of an RNA silencing method involves the use of antisense nucleic acid sequences. An “antisense” nucleic acid sequence comprises a nucleotide sequence that is complementary to a “sense” nucleic acid sequence encoding a protein, i.e. complementary to the coding strand of a double-stranded cDNA molecule or complementary to an mRNA transcript sequence. The antisense nucleic acid sequence is preferably complementary to the endogenous gene to be silenced. The complementarity may be located in the “coding region” and/or in the “non-coding region” of a gene. The term “coding region” refers to a region of the nucleotide sequence comprising codons that are translated into amino acid residues. The term “non-coding region” refers to 5′ and 3′ sequences that flank the coding region that are transcribed but not translated into amino acids (also referred to as 5′ and 3′ untranslated regions).

[0098] Antisense nucleic acid sequences can be designed according to the rules of Watson and Crick base pairing. The antisense nucleic acid sequence may be complementary to the entire nucleic acid sequence (in this case a stretch of substantially contiguous nucleotides derived from the gene of interest, or from any nucleic acid capable of encoding an orthologue, paralogue or homologue of the protein of interest), but may also be an oligonucleotide that is antisense to only a part of the nucleic acid sequence (including the mRNA 5′ and 3′ UTR). For example, the antisense oligonucleotide sequence may be complementary to the region surrounding the translation start site of an mRNA transcript encoding a polypeptide. The length of a suitable antisense oligonucleotide sequence is known in the art and may start from about 50, 45, 40, 35, 30, 25, 20, 15 or 10 nucleotides in length or less. An antisense nucleic acid sequence according to the invention may be constructed using chemical synthesis and enzymatic ligation reactions using methods known in the art. For example, an antisense nucleic acid sequence (e.g., an antisense oligonucleotide sequence) may be chemically synthesized using naturally occurring nucleotides or variously modified nucleotides designed to increase the biological stability of the molecules or to increase the physical stability of the duplex formed between the antisense and sense nucleic acid sequences, e.g., phosphorothioate derivatives and acridine substituted nucleotides may be used. Examples of modified nucleotides that may be used to generate the antisense nucleic acid sequences are well known in the art. Known nucleotide modifications include methylation, cyclization and ‘caps’ and substitution of one or more of the naturally occurring nucleotides with an analogue such as inosine. Other modifications of nucleotides are well known in the art.

[0099] The antisense nucleic acid sequence can be produced biologically using an expression vector into which a nucleic acid sequence has been subcloned in an antisense orientation (i.e., RNA transcribed from the inserted nucleic acid will be of an antisense orientation to a target nucleic acid of interest). Preferably, production of antisense nucleic acid sequences in plants occurs by means of a stably integrated nucleic acid construct comprising a promoter, an operably linked antisense oligonucleotide, and a terminator.

[0100] The nucleic acid molecules used for silencing in the methods of the invention (whether introduced into a plant or generated in situ) hybridize with or bind to mRNA transcripts and/or genomic DNA encoding a polypeptide to thereby inhibit expression of the protein, e.g., by inhibiting transcription and/or translation. The hybridization can be by conventional nucleotide complementarity to form a stable duplex, or, for example, in the case of an antisense nucleic acid sequence which binds to DNA duplexes, through specific interactions in the major groove of the double helix. Antisense nucleic acid sequences may be introduced into a plant by transformation or direct injection at a specific tissue site. Alternatively, antisense nucleic acid sequences can be modified to target selected cells and then administered systemically. For example, for systemic administration, antisense nucleic acid sequences can be modified such that they specifically bind to receptors or antigens expressed on a selected cell surface, e.g., by linking the antisense nucleic acid sequence to peptides or antibodies which bind to cell surface receptors or antigens. The antisense nucleic acid sequences can also be delivered to cells using the vectors described herein.

[0101] According to a further aspect, the antisense nucleic acid sequence is an a-anomeric nucleic acid sequence. An a-anomeric nucleic acid sequence forms specific double-stranded hybrids with complementary RNA in which, contrary to the usual b-units, the strands run parallel to each other (Gaultier et al. (1987) Nucl Ac Res 15: 6625-6641). The antisense nucleic acid sequence may also comprise a 2′-o-methylribonucleotide (Inoue et al. (1987) Nucl Ac Res 15, 6131-6148) or a chimeric RNA-DNA analogue (Inoue et al. (1987) FEBS Lett. 215, 327-330).

[0102] The reduction or substantial elimination of endogenous gene expression may also be performed using ribozymes. Ribozymes are catalytic RNA molecules with ribonuclease activity that are capable of cleaving a single-stranded nucleic acid sequence, such as an mRNA, to which they have a complementary region. Thus, ribozymes (e.g., hammerhead ribozymes (described in Haselhoff and Gerlach (1988) Nature 334, 585-591) can be used to catalytically cleave mRNA transcripts encoding a polypeptide, thereby substantially reducing the number of mRNA transcripts to be translated into a polypeptide. A ribozyme having specificity for a nucleic acid sequence can be designed (see for example: Cech et al. U.S. Pat. No. 4,987,071; and Cech et al. U.S. Pat. No. 5,116,742). Alternatively, mRNA transcripts corresponding to a nucleic acid sequence can be used to select a catalytic RNA having a specific ribonuclease activity from a pool of RNA molecules (Bartel and Szostak (1993) Science 261, 1411-1418). The use of ribozymes for gene silencing in plants is known in the art (e.g., Atkins et al. (1994) WO 94/00012; Lenne et al. (1995) WO 95/03404; Lutziger et al. (2000) WO 00/00619; Prinsen et al. (1997) WO 97/13865 and Scott et al. (1997) WO 97/38116).

[0103] Gene silencing may also be achieved by insertion mutagenesis (for example, T-DNA insertion or transposon insertion) or by strategies as described by, among others, Angell and Baulcombe ((1999) Plant J 20(3): 357-62), (Amplicon VIGS WO 98/36083), or Baulcombe (WO 99/15682).

[0104] Gene silencing may also occur if there is a mutation on an endogenous gene and/or a mutation on an isolated gene/nucleic acid subsequently introduced into a plant. The reduction or substantial elimination may be caused by a non-functional polypeptide. For example, the polypeptide may bind to various interacting proteins; one or more mutation(s) and/or truncation(s) may therefore provide for a polypeptide that is still able to bind interacting proteins (such as receptor proteins) but that cannot exhibit its normal function (such as signalling ligand).

[0105] A further approach to gene silencing is by targeting nucleic acid sequences complementary to the regulatory region of the gene (e.g., the promoter and/or enhancers) to form triple helical structures that prevent transcription of the gene in target cells. See Helene, C., Anticancer Drug Res. 6, 569-84, 1991; Helene et al., Ann. N.Y. Acad. Sci. 660, 27-36 1992; and Maher, L. J. Bioassays 14, 807-15, 1992.

[0106] Other methods, such as the use of antibodies directed to an endogenous polypeptide for inhibiting its function in planta, or interference in the signalling pathway in which a polypeptide is involved, will be well known to the skilled man. In particular, it can be envisaged that manmade molecules may be useful for inhibiting the biological function of a target polypeptide, or for interfering with the signalling pathway in which the target polypeptide is involved.

[0107] Alternatively, a screening program may be set up to identify in a plant population natural variants of a gene, which variants encode polypeptides with reduced activity. Such natural variants may also be used for example, to perform homologous recombination.

[0108] Artificial and/or natural microRNAs (miRNAs) may be used to knock out gene expression and/or mRNA translation. Endogenous miRNAs are single stranded small RNAs of typically 19-24 nucleotides long. They function primarily to regulate gene expression and/or mRNA translation. Most plant microRNAs (miRNAs) have perfect or near-perfect complementarity with their target sequences. However, there are natural targets with up to five mismatches. They are processed from longer non-coding RNAs with characteristic fold-back structures by double-strand specific RNases of the Dicer family. Upon processing, they are incorporated in the RNA-induced silencing complex (RISC) by binding to its main component, an Argonaute protein. MiRNAs serve as the specificity components of RISC, since they base-pair to target nucleic acids, mostly mRNAs, in the cytoplasm. Subsequent regulatory events include target mRNA cleavage and destruction and/or translational inhibition. Effects of miRNA overexpression are thus often reflected in decreased mRNA levels of target genes.

[0109] Artificial microRNAs (amiRNAs), which are typically 21 nucleotides in length, can be genetically engineered specifically to negatively regulate gene expression of single or multiple genes of interest. Determinants of plant microRNA target selection are well known in the art. Empirical parameters for target recognition have been defined and can be used to aid in the design of specific amiRNAs, (Schwab et al., Dev. Cell 8, 517-527, 2005). Convenient tools for design and generation of amiRNAs and their precursors are also available to the public (Schwab et al., Plant Cell 18, 1121-1133, 2006).

[0110] For optimal performance, the gene silencing techniques used for reducing expression in a plant of an endogenous gene requires the use of nucleic acid sequences from monocotyledonous plants for transformation of monocotyledonous plants, and from dicotyledonous plants for transformation of dicotyledonous plants. Preferably, a nucleic acid sequence from any given plant species is introduced into that same species. For example, a nucleic acid sequence from rice is transformed into a rice plant. However, it is not an absolute requirement that the nucleic acid sequence to be introduced originates from the same plant species as the plant in which it will be introduced. It is sufficient that there is substantial homology between the endogenous target gene and the nucleic acid to be introduced.

[0111] Described above are examples of various methods for the reduction or substantial elimination of expression in a plant of an endogenous gene. A person skilled in the art would readily be able to adapt the aforementioned methods for silencing so as to achieve reduction of expression of an endogenous gene in a whole plant or in parts thereof through the use of an appropriate promoter, for example.

### Transformation

[0112] The term “introduction” or “transformation” as referred to herein encompasses the transfer of an exogenous polynucleotide into a host cell, irrespective of the method used for transfer. Plant tissue capable of subsequent clonal propagation, whether by organogenesis or embryogenesis, may be transformed with a genetic construct of the present invention and a whole plant regenerated there from. The particular tissue chosen will vary depending on the clonal propagation systems available for, and best suited to, the particular species being transformed. Exemplary tissue targets include leaf disks, pollen, embryos, cotyledons, hypocotyls, megagametophytes, callus tissue, existing meristematic tissue (e.g., apical meristem, axillary buds, and root meristems), and induced meristem tissue (e.g., cotyledon meristem and hypocotyl meristem). The polynucleotide may be transiently or stably introduced into a host cell and may be maintained non-integrated, for example, as a plasmid. Alternatively, it may be integrated into the host genome. The resulting transformed plant cell may then be used to regenerate a transformed plant in a manner known to persons skilled in the art.

[0113] The transfer of foreign genes into the genome of a plant is called transformation. Transformation of plant species is now a fairly routine technique. Advantageously, any of several transformation methods may be used to introduce the gene of interest into a suitable ancestor cell. The methods described for the transformation and regeneration of plants from plant tissues or plant cells may be utilized for transient or for stable transformation. Transformation methods include the use of liposomes, electroporation, chemicals that increase free DNA uptake, injection of the DNA directly into the plant, particle gun bombardment, transformation using viruses or pollen and microprojection. Methods may be selected from the calcium/polyethylene glycol method for protoplasts (Krens, F. A. et al., (1982) Nature 296, 72-74; Negrutiu I et al. (1987) Plant Mol Biol 8: 363-373); electroporation of protoplasts (Shillito R. D. et al. (1985) Bio/Technol 3, 1099-1102); microinjection into plant material (Crossway A et al., (1986) Mol. Gen Genet 202: 179-185); DNA or RNA-coated particle bombardment (Klein T M et al., (1987) Nature 327: 70) infection with (non-integrative) viruses and the like. Transgenic plants, including transgenic crop plants, are preferably produced via Agrobacterium-mediated transformation. An advantageous transformation method is the transformation in planta. To this end, it is possible, for example, to allow the agrobacteria to act on plant seeds or to inoculate the plant meristem with agrobacteria. It has proved particularly expedient in accordance with the invention to allow a suspension of transformed agrobacteria to act on the intact plant or at least on the flower primordia. The plant is subsequently grown on until the seeds of the treated plant are obtained (Clough and Bent, Plant J. (1998) 16, 735-743). Methods for Agrobacterium-mediated transformation of rice include well known methods for rice transformation, such as those described in any of the following: European patent application EP 1198985 A1, Aldemita and Hodges (Planta 199: 612-617, 1996); Chan et al. (Plant Mol Biol 22 (3): 491-506, 1993), Hiei et al. (Plant J 6 (2): 271-282, 1994), which disclosures are incorporated by reference herein as if fully set forth. In the case of corn transformation, the preferred method is as described in either Ishida et al. (Nat. Biotechnol 14(6): 745-50, 1996) or Frame et al. (Plant Physiol 129(1): 13-22, 2002), which disclosures are incorporated by reference herein as if fully set forth. Said methods are further described by way of example in B. Jenes et al., Techniques for Gene Transfer, in: Transgenic Plants, Vol. 1, Engineering and Utilization, eds. S. D. Kung and R. Wu, Academic Press (1993) 128-143 and in Potrykus Annu. Rev. Plant Physiol. Plant Molec. Biol. 42 (1991) 205-225). The nucleic acids or the construct to be expressed is preferably cloned into a vector, which is suitable for transforming Agrobacterium tumefaciens, for example pBin19 (Bevan et al., Nucl. Acids Res. 12 (1984) 8711). Agrobacteria transformed by such a vector can then be used in known manner for the transformation of plants, such as plants used as a model, like Arabidopsis (Arabidopsis thaliana is within the scope of the present invention not considered as a crop plant), or crop plants such as, by way of example, tobacco plants, for example by immersing bruised leaves or chopped leaves in an agrobacterial solution and then culturing them in suitable media. The transformation of plants by means of Agrobacterium tumefaciens is described, for example, by Höfgen and Willmitzer in Nucl. Acid Res. (1988) 16, 9877 or is known inter alia from F. F. White, Vectors for Gene Transfer in Higher Plants; in Transgenic Plants, Vol. 1, Engineering and Utilization, eds. S. D. Kung and R. Wu, Academic Press, 1993, pp. 15-38.

[0114] In addition to the transformation of somatic cells, which then have to be regenerated into intact plants, it is also possible to transform the cells of plant meristems and in particular those cells which develop into gametes. In this case, the transformed gametes follow the natural plant development, giving rise to transgenic plants. Thus, for example, seeds of Arabidopsis are treated with agrobacteria and seeds are obtained from the developing plants of which a certain proportion is transformed and thus transgenic [Feldman, K A and Marks M D (1987). Mol Gen Genet 208:1-9; Feldmann K (1992). In: C Koncz, N-H Chua and J Shell, eds, Methods in Arabidopsis Research. Word Scientific, Singapore, pp. 274-289]. Alternative methods are based on the repeated removal of the inflorescences and incubation of the excision site in the center of the rosette with transformed agrobacteria, whereby transformed seeds can likewise be obtained at a later point in time (Chang (1994). Plant J. 5: 551-558; Katavic (1994). Mol Gen Genet, 245: 363-370). However, an especially effective method is the vacuum infiltration method with its modifications such as the “floral dip” method. In the case of vacuum infiltration of Arabidopsis, intact plants under reduced pressure are treated with an agrobacterial suspension [Bechthold, N (1993). C R Acad Sci Paris Life Sci, 316: 1194-1199], while in the case of the “floral dip” method the developing floral tissue is incubated briefly with a surfactant-treated agrobacterial suspension [Clough, S J and Bent A F (1998) The Plant J. 16, 735-743]. A certain proportion of transgenic seeds are harvested in both cases, and these seeds can be distinguished from non-transgenic seeds by growing under the above-described selective conditions. In addition the stable transformation of plastids is of advantages because plastids are inherited maternally is most crops reducing or eliminating the risk of transgene flow through pollen. The transformation of the chloroplast genome is generally achieved by a process which has been schematically displayed in Klaus et al., 2004 [Nature Biotechnology 22 (2), 225-229]. Briefly the sequences to be transformed are cloned together with a selectable marker gene between flanking sequences homologous to the chloroplast genome. These homologous flanking sequences direct site specific integration into the plastome. Plastidal transformation has been described for many different plant species and an overview is given in Bock (2001) Transgenic plastids in basic research and plant biotechnology. J Mol Biol. 2001 Sep. 21; 312 (3):425-38 or Maliga, P (2003) Progress towards commercialization of plastid transformation technology. Trends Biotechnol. 21, 20-28. Further biotechnological progress has recently been reported in form of marker free plastid transformants, which can be produced by a transient co-integrated maker gene (Klaus et al., 2004, Nature Biotechnology 22(2), 225-229).

[0115] The genetically modified plant cells can be regenerated via all methods with which the skilled worker is familiar. Suitable methods can be found in the above-mentioned publications by S. D. Kung and R. Wu, Potrykus or Hofgen and Willmitzer.

[0116] Generally after transformation, plant cells or cell groupings are selected for the presence of one or more markers which are encoded by plant-expressible genes co-transferred with the gene of interest, following which the transformed material is regenerated into a whole plant. To select transformed plants, the plant material obtained in the transformation is, as a rule, subjected to selective conditions so that transformed plants can be distinguished from untransformed plants. For example, the seeds obtained in the above-described manner can be planted and, after an initial growing period, subjected to a suitable selection by spraying. A further possibility consists in growing the seeds, if appropriate after sterilization, on agar plates using a suitable selection agent so that only the transformed seeds can grow into plants. Alternatively, the transformed plants are screened for the presence of a selectable marker such as the ones described above.

[0117] Following DNA transfer and regeneration, putatively transformed plants may also be evaluated, for instance using Southern analysis, for the presence of the gene of interest, copy number and/or genomic organisation. Alternatively or additionally, expression levels of the newly introduced DNA may be monitored using Northern and/or Western analysis, both techniques being well known to persons having ordinary skill in the art.

[0118] The generated transformed plants may be propagated by a variety of means, such as by clonal propagation or classical breeding techniques. For example, a first generation (or T1) transformed plant may be selfed and homozygous second-generation (or T2) transformants selected, and the T2 plants may then further be propagated through classical breeding techniques. The generated transformed organisms may take a variety of forms. For example, they may be chimeras of transformed cells and non-transformed cells; clonal transformants (e.g., all cells transformed to contain the expression cassette); grafts of transformed and untransformed tissues (e.g., in plants, a transformed rootstock grafted to an untransformed scion).

### T-DNA Activation Tagging

[0119] T-DNA activation tagging (Hayashi et al. Science (1992) 1350-1353), involves insertion of T-DNA, usually containing a promoter (may also be a translation enhancer or an intron), in the genomic region of the gene of interest or 10 kb up- or downstream of the coding region of a gene in a configuration such that the promoter directs expression of the targeted gene. Typically, regulation of expression of the targeted gene by its natural promoter is disrupted and the gene falls under the control of the newly introduced promoter. The promoter is typically embedded in a T-DNA. This T-DNA is randomly inserted into the plant genome, for example, through Agrobacterium infection and leads to modified expression of genes near the inserted T-DNA. The resulting transgenic plants show dominant phenotypes due to modified expression of genes close to the introduced promoter.

### TILLING

[0120] The term “TILLING” is an abbreviation of “Targeted Induced Local Lesions In Genomes” and refers to a mutagenesis technology useful to generate and/or identify nucleic acids encoding proteins with modified expression and/or activity. TILLING also allows selection of plants carrying such mutant variants. These mutant variants may exhibit modified expression, either in strength or in location or in timing (if the mutations affect the promoter for example). These mutant variants may exhibit higher activity than that exhibited by the gene in its natural form. TILLING combines high-density mutagenesis with high-throughput screening methods. The steps typically followed in TILLING are: (a) EMS mutagenesis (Redei G P and Koncz C (1992) In Methods in Arabidopsis Research, Koncz C, Chua N H, Schell J, eds. Singapore, World Scientific Publishing Co, pp. 16-82; Feldmann et al., (1994) In Meyerowitz E M, Somerville C R, eds, Arabidopsis. Cold Spring Harbor Laboratory Press, Cold Spring Harbor, N.Y., pp 137-172; Lightner J and Caspar T (1998) In J Martinez-Zapater, J Salinas, eds, Methods on Molecular Biology, Vol. 82. Humana Press, Totowa, N.J., pp 91-104); (b) DNA preparation and pooling of individuals; (c) PCR amplification of a region of interest; (d) denaturation and annealing to allow formation of heteroduplexes; (e) DHPLC, where the presence of a heteroduplex in a pool is detected as an extra peak in the chromatogram; (f) identification of the mutant individual; and (g) sequencing of the mutant PCR product. Methods for TILLING are well known in the art (McCallum et al., (2000) Nat Biotechnol 18: 455-457; reviewed by Stemple (2004) Nat Rev Genet 5(2): 145-50).

### Homologous Recombination

[0121] Homologous recombination allows introduction in a genome of a selected nucleic acid at a defined selected position. Homologous recombination is a standard technology used routinely in biological sciences for lower organisms such as yeast or the moss Physcomitrella. Methods for performing homologous recombination in plants have been described not only for model plants (Offringa et al. (1990) EMBO J 9(10): 3077-84) but also for crop plants, for example rice (Terada et al. (2002) Nat Biotech 20(10): 1030-4; Iida and Terada (2004) Curr Opin Biotech 15(2): 132-8), and approaches exist that are generally applicable regardless of the target organism (Miller et al, Nature Biotechnol. 25, 778-785, 2007).

### Yield Related Traits

[0122] Yield related traits are traits or features which are related to plant yield. Yield-related traits may comprise one or more of the following non-limitative list of features: early flowering time, yield, biomass, seed yield, early vigour, greenness index, increased growth rate, improved agronomic traits, such as e.g. improved Water Use Efficiency (WUE), improved Nitrogen Use Efficiency (NUE), etc.

### Yield

[0123] The term “yield” in general means a measurable produce of economic value, typically related to a specified crop, to an area, and to a period of time. Individual plant parts directly contribute to yield based on their number, size and/or weight, or the actual yield is the yield per square meter for a crop and year, which is determined by dividing total production (includes both harvested and appraised production) by planted square meters.

[0124] The terms “yield” of a plant and “plant yield” are used interchangeably herein and are meant to refer to vegetative biomass such as root and/or shoot biomass, to reproductive organs, and/or to propagules such as seeds of that plant.

[0125] Taking corn as an example, male inflorescences (tassels) and female inflorescences (ears). The female inflorescence produces pairs of spikelets on the surface of a central axis (cob). Each of the female spikelets encloses two fertile florests, one of whose will usually mature into a maize kernel once fertilized. Hence a yield increase in maize may be manifested as one or more of the following: increase in the number of plants established per square meter, an increase in the number of ears per plant, an increase in the number of rows, number of kernels per row, kernel weight, thousand kernel weight, ear length/diameter, increase in the seed filling rate, which is the number of filled florets (i.e. florets containing seed) divided by the total number of florets and multiplied by 100), among others.

[0126] Inflorescences in rice plants are called panicles. The panicle bears spikelets. The spikelet is the basic unit of the panicles and consists of a pedicel and a floret. The floret is born on the pedicel. A floret includes a flower that is covered by two protective glumes: a larger glume (the lemma) and a shorter glume (the palea). Hence, taking rice as an example, a yield increase may manifest itself as an increase in one or more of the following: number of plants per square meter, number of panicles per plant, panicle length, number of spikelets per panicle, number of flowers (or florets) per panicle, increase in the seed filling rate which is the number of filled florets (i.e. florets containing seeds divided by the total number of floretsand multiplied by 100), increase in thousand kernel weight, among others. In rice, submergence tolerance may also result in increased yield.

### Early Flowering Time

[0127] Plants having an “early flowering time” as used herein are plants which start to flower earlier than control plants. Hence this term refers to plants that show an earlier start of flowering. Flowering time of plants can be assessed by counting the number of days (“time to flower”) between sowing and the emergence of a first inflorescence. The “flowering time” of a plant can for instance be determined using the method as described in WO 2007/093444.

### Early Vigour

[0128] “Early vigour” refers to active healthy well-balanced growth especially during early stages of plant growth, and may result from increased plant fitness due to, for example, the plants being better adapted to their environment (i.e. optimizing the use of energy resources and partitioning between shoot and root). Plants having early vigour also show increased seedling survival and a better establishment of the crop, which often results in highly uniform fields (with the crop growing in uniform manner, i.e. with the majority of plants reaching the various stages of development at substantially the same time), and often better and higher yield. Therefore, early vigour may be determined by measuring various factors, such as thousand kernel weight, percentage germination, percentage emergence, seedling growth, seedling height, root length, root and shoot biomass and many more.

### Increased Growth Rate

[0129] The increased growth rate may be specific to one or more parts of a plant (including seeds), or may be throughout substantially the whole plant. Plants having an increased growth rate may have a shorter life cycle. The life cycle of a plant may be taken to mean the time needed to grow from a dry mature seed up to the stage where the plant has produced dry mature seeds, similar to the starting material. This life cycle may be influenced by factors such as speed of germination, early vigour, growth rate, greenness index, flowering time and speed of seed maturation. The increase in growth rate may take place at one or more stages in the life cycle of a plant or during substantially the whole plant life cycle. Increased growth rate during the early stages in the life cycle of a plant may reflect enhanced vigour. The increase in growth rate may alter the harvest cycle of a plant allowing plants to be sown later and/or harvested sooner than would otherwise be possible (a similar effect may be obtained with earlier flowering time). If the growth rate is sufficiently increased, it may allow for the further sowing of seeds of the same plant species (for example sowing and harvesting of rice plants followed by sowing and harvesting of further rice plants all within one conventional growing period). Similarly, if the growth rate is sufficiently increased, it may allow for the further sowing of seeds of different plants species (for example the sowing and harvesting of corn plants followed by, for example, the sowing and optional harvesting of soybean, potato or any other suitable plant). Harvesting additional times from the same rootstock in the case of some crop plants may also be possible. Altering the harvest cycle of a plant may lead to an increase in annual biomass production per square meter (due to an increase in the number of times (say in a year) that any particular plant may be grown and harvested). An increase in growth rate may also allow for the cultivation of transgenic plants in a wider geographical area than their wild-type counterparts, since the territorial limitations for growing a crop are often determined by adverse environmental conditions either at the time of planting (early season) or at the time of harvesting (late season). Such adverse conditions may be avoided if the harvest cycle is shortened. The growth rate may be determined by deriving various parameters from growth curves, such parameters may be: T-Mid (the time taken for plants to reach 50% of their maximal size) and T-90 (time taken for plants to reach 90% of their maximal size), amongst others.

### Stress Resistance

[0130] An increase in yield and/or growth rate occurs whether the plant is under non-stress conditions or whether the plant is exposed to various stresses compared to control plants. Plants typically respond to exposure to stress by growing more slowly. In conditions of severe stress, the plant may even stop growing altogether. Mild stress on the other hand is defined herein as being any stress to which a plant is exposed which does not result in the plant ceasing to grow altogether without the capacity to resume growth. Mild stress in the sense of the invention leads to a reduction in the growth of the stressed plants of less than 40%, 35%, 30% or 25%, more preferably less than 20% or 15% in comparison to the control plant under non-stress conditions. Due to advances in agricultural practices (irrigation, fertilization, pesticide treatments) severe stresses are not often encountered in cultivated crop plants. As a consequence, the compromised growth induced by mild stress is often an undesirable feature for agriculture. “Mild stresses” are the everyday biotic and/or abiotic (environmental) stresses to which a plant is exposed. Abiotic stresses may be due to drought or excess water, anaerobic stress, salt stress, chemical toxicity, oxidative stress and hot, cold or freezing temperatures.

[0131] “Biotic stresses” are typically those stresses caused by pathogens, such as bacteria, viruses, fungi, nematodes and insects.

[0132] The “abiotic stress” may be an osmotic stress caused by a water stress, e.g. due to drought, salt stress, or freezing stress. Abiotic stress may also be an oxidative stress or a cold stress. “Freezing stress” is intended to refer to stress due to freezing temperatures, i.e. temperatures at which available water molecules freeze and turn into ice. “Cold stress”, also called “chilling stress”, is intended to refer to cold temperatures, e.g. temperatures below 10°, or preferably below 5° C., but at which water molecules do not freeze. As reported in Wang et al. (Planta (2003) 218: 1-14), abiotic stress leads to a series of morphological, physiological, biochemical and molecular changes that adversely affect plant growth and productivity. Drought, salinity, extreme temperatures and oxidative stress are known to be interconnected and may induce growth and cellular damage through similar mechanisms. Rabbani et al. (Plant Physiol (2003) 133: 1755-1767) describes a particularly high degree of “cross talk” between drought stress and high-salinity stress. For example, drought and/or salinisation are manifested primarily as osmotic stress, resulting in the disruption of homeostasis and ion distribution in the cell. Oxidative stress, which frequently accompanies high or low temperature, salinity or drought stress, may cause denaturing of functional and structural proteins. As a consequence, these diverse environmental stresses often activate similar cell signalling pathways and cellular responses, such as the production of stress proteins, up-regulation of anti-oxidants, accumulation of compatible solutes and growth arrest. The term “non-stress” conditions as used herein are those environmental conditions that allow optimal growth of plants. Persons skilled in the art are aware of normal soil conditions and climatic conditions for a given location. Plants with optimal growth conditions, (grown under non-stress conditions) typically yield in increasing order of preference at least 97%, 95%, 92%, 90%, 87%, 85%, 83%, 80%, 77% or 75% of the average production of such plant in a given environment. Average production may be calculated on harvest and/or season basis. Persons skilled in the art are aware of average yield productions of a crop.

[0133] In particular, the methods of the present invention may be performed under non-stress conditions. In an example, the methods of the present invention may be performed under non-stress conditions such as mild drought to give plants having increased yield relative to control plants.

[0134] In another embodiment, the methods of the present invention may be performed under stress conditions.

[0135] In an example, the methods of the present invention may be performed under stress conditions such as drought to give plants having increased yield relative to control plants. In another example, the methods of the present invention may be performed under stress conditions such as nutrient deficiency to give plants having increased yield relative to control plants.

[0136] Nutrient deficiency may result from a lack of nutrients such as nitrogen, phosphates and other phosphorous-containing compounds, potassium, calcium, magnesium, manganese, iron and boron, amongst others.

[0137] In yet another example, the methods of the present invention may be performed under stress conditions such as salt stress to give plants having increased yield relative to control plants. The term salt stress is not restricted to common salt (NaCl), but may be any one or more of: NaCl, KCl, LiCl, MgCl₂, CaCl₂, amongst others.

[0138] In yet another example, the methods of the present invention may be performed under stress conditions such as cold stress or freezing stress to give plants having increased yield relative to control plants.

### Increase/Improve/Enhance

[0139] The terms “increase”, “improve” or “enhance” are interchangeable and shall mean in the sense of the application at least a 3%, 4%, 5%, 6%, 7%, 8%, 9% or 10%, preferably at least 15% or 20%, more preferably 25%, 30%, 35% or 40% more yield and/or growth in comparison to control plants as defined herein.

### Seed Yield

[0140] Increased seed yield may manifest itself as one or more of the following:
[0141] (a) an increase in seed biomass (total seed weight) which may be on an individual seed basis and/or per plant and/or per square meter;
[0142] (b) increased number of flowers per plant;
[0143] (c) increased number of seeds;
[0144] (d) increased seed filling rate (which is expressed as the ratio between the number of filled florets divided by the total number of florets);
[0145] (e) increased harvest index, which is expressed as a ratio of the yield of harvestable parts, such as seeds, divided by the biomass of aboveground plant parts; and
[0146] (f) increased thousand kernel weight (TKW), which is extrapolated from the number of seeds counted and their total weight. An increased TKW may result from an increased seed size and/or seed weight, and may also result from an increase in embryo and/or endosperm size.

[0147] An increase in seed yield may also be manifested as an increase in seed size and/or seed volume. Furthermore, an increase in seed yield may also manifest itself as an increase in seed area and/or seed length and/or seed width and/or seed perimeter.

### Greenness Index

[0148] The “greenness index” as used herein is calculated from digital images of plants. For each pixel belonging to the plant object on the image, the ratio of the green value versus the red value (in the RGB model for encoding color) is calculated. The greenness index is expressed as the percentage of pixels for which the green-to-red ratio exceeds a given threshold. Under normal growth conditions, under salt stress growth conditions, and under reduced nutrient availability growth conditions, the greenness index of plants is measured in the last imaging before flowering. In contrast, under drought stress growth conditions, the greenness index of plants is measured in the first imaging after drought.

### Biomass

[0149] The term “biomass” as used herein is intended to refer to the total weight of a plant. Within the definition of biomass, a distinction may be made between the biomass of one or more parts of a plant, which may include any one or more of the following:
[0150] aboveground parts such as but not limited to shoot biomass, seed biomass, leaf biomass, etc.;
[0151] aboveground harvestable parts such as but not limited to shoot biomass, seed biomass, leaf biomass, etc.;
[0152] parts below ground, such as but not limited to root biomass, etc.;
[0153] harvestable parts below ground, such as but not limited to root biomass, etc.;
[0154] vegetative biomass such as root biomass, shoot biomass, etc.;
[0155] reproductive organs; and
[0156] propagules such as seed.

### Marker Assisted Breeding

[0157] Such breeding programmes sometimes require introduction of allelic variation by mutagenic treatment of the plants, using for example EMS mutagenesis; alternatively, the programme may start with a collection of allelic variants of so called “natural” origin caused unintentionally. Identification of allelic variants then takes place, for example, by PCR. This is followed by a step for selection of superior allelic variants of the sequence in question and which give increased yield. Selection is typically carried out by monitoring growth performance of plants containing different allelic variants of the sequence in question. Growth performance may be monitored in a greenhouse or in the field. Further optional steps include crossing plants in which the superior allelic variant was identified with another plant. This could be used, for example, to make a combination of interesting phenotypic features.

### Use as Probes in (Gene Mapping)

[0158] Use of nucleic acids encoding the protein of interest for genetically and physically mapping the genes requires only a nucleic acid sequence of at least 15 nucleotides in length. These nucleic acids may be used as restriction fragment length polymorphism (RFLP) markers. Southern blots (Sambrook J, Fritsch E F and Maniatis T (1989) Molecular Cloning, A Laboratory Manual) of restriction-digested plant genomic DNA may be probed with the nucleic acids encoding the protein of interest. The resulting banding patterns may then be subjected to genetic analyses using computer programs such as MapMaker (Lander et al. (1987) Genomics 1: 174-181) in order to construct a genetic map. In addition, the nucleic acids may be used to probe Southern blots containing restriction endonuclease-treated genomic DNAs of a set of individuals representing parent and progeny of a defined genetic cross. Segregation of the DNA polymorphisms is noted and used to calculate the position of the nucleic acid encoding the protein of interest in the genetic map previously obtained using this population (Botstein et al. (1980) Am. J. Hum. Genet. 32:314-331).

[0159] The production and use of plant gene-derived probes for use in genetic mapping is described in Bernatzky and Tanksley (1986) Plant Mol. Biol. Reporter 4: 37-41. Numerous publications describe genetic mapping of specific cDNA clones using the methodology outlined above or variations thereof. For example, F2 intercross populations, backcross populations, randomly mated populations, near isogenic lines, and other sets of individuals may be used for mapping. Such methodologies are well known to those skilled in the art.

[0160] The nucleic acid probes may also be used for physical mapping (i.e., placement of sequences on physical maps; see Hoheisel et al. In: Non-mammalian Genomic Analysis: A Practical Guide, Academic press 1996, pp. 319-346, and references cited therein).

[0161] In another embodiment, the nucleic acid probes may be used in direct fluorescence in situ hybridisation (FISH) mapping (Trask (1991) Trends Genet. 7:149-154). Although current methods of FISH mapping favour use of large clones (several kb to several hundred kb; see Laan et al. (1995) Genome Res. 5:13-20), improvements in sensitivity may allow performance of FISH mapping using shorter probes.

[0162] A variety of nucleic acid amplification-based methods for genetic and physical mapping may be carried out using the nucleic acids. Examples include allele-specific amplification (Kazazian (1989) J. Lab. Clin. Med 11:95-96), polymorphism of PCR-amplified fragments (CAPS; Sheffield et al. (1993) Genomics 16:325-332), allele-specific ligation (Landegren et al. (1988) Science 241:1077-1080), nucleotide extension reactions (Sokolov (1990) Nucleic Acid Res. 18:3671), Radiation Hybrid Mapping (Walter et al. (1997) Nat. Genet. 7:22-28) and Happy Mapping (Dear and Cook (1989) Nucleic Acid Res. 17:6795-6807). For these methods, the sequence of a nucleic acid is used to design and produce primer pairs for use in the amplification reaction or in primer extension reactions. The design of such primers is well known to those skilled in the art. In methods employing PCR-based genetic mapping, it may be necessary to identify DNA sequence differences between the parents of the mapping cross in the region corresponding to the instant nucleic acid sequence. This, however, is generally not necessary for mapping methods.

### Plant

[0163] The term “plant” as used herein encompasses whole plants, ancestors and progeny of the plants and plant parts, including seeds, shoots, stems, leaves, roots (including tubers), flowers, and tissues and organs, wherein each of the aforementioned comprise the gene/nucleic acid of interest. The term “plant” also encompasses plant cells, suspension cultures, callus tissue, embryos, meristematic regions, gametophytes, sporophytes, pollen and microspores, again wherein each of the aforementioned comprises the gene/nucleic acid of interest.

[0164] Plants that are particularly useful in the methods of the invention include all plants which belong to the superfamily Viridiplantae, in particular monocotyledonous and dicotyledonous plants including fodder or forage legumes, ornamental plants, food crops, trees or shrubs selected from the list comprising Acer spp., Actinidia spp., Abelmoschus spp., Agave sisalana, Agropyron spp., Agrostis stolonifera, Allium spp., Amaranthus spp., Ammophila arenaria, Ananas comosus, Annona spp., Apium graveolens, Arachis spp, Artocarpus spp., Asparagus officinalis, Avena spp. (e.g. Avena sativa, Avena fatua, Avena byzantina, Avena fatua var. sativa, Avena hybrida), Averrhoa carambola, Bambusa sp., Benincasa hispida, Bertholletia excelsea, Beta vulgaris, Brassica spp. (e.g. Brassica napus, Brassica rapa ssp. [canola, oilseed rape, turnip rape]), Cadaba farinosa, Camellia sinensis, Canna indica, Cannabis sativa, Capsicum spp., Carex elata, Carica papaya, Carissa macrocarpa, Carya spp., Carthamus tinctorius, Castanea spp., Ceiba pentandra, Cichorium endivia, Cinnamomum spp., Citrullus lanatus, Citrus spp., Cocos spp., Coffea spp., Colocasia esculenta, Cola spp., Corchorus sp., Coriandrum sativum, Corylus spp., Crataegus spp., Crocus sativus, Cucurbita spp., Cucumis spp., Cynara spp., Daucus carota, Desmodium spp., Dimocarpus longan, Dioscorea spp., Diospyros spp., Echinochloa spp., Elaeis (e.g. Elaeis guineensis, Elaeis oleifera), Eleusine coracana, Eragrostis tef, Erianthus sp., Eriobotrya japonica, Eucalyptus sp., Eugenia uniflora, Fagopyrum spp., Fagus spp., Festuca arundinacea, Ficus carica, Fortunella spp., Fragaria spp., Ginkgo biloba, Glycine spp. (e.g. Glycine max, Soja hispida or Soja max), Gossypium hirsutum, Helianthus spp. (e.g. Helianthus annuus), Hemerocallis fulva, Hibiscus spp., Hordeum spp. (e.g. Hordeum vulgare), Ipomoea batatas, Juglans spp., Lactuca sativa, Lathyrus spp., Lens culinaris, Linum usitatissimum, Litchi chinensis, Lotus spp., Luffa acutangula, Lupinus spp., Luzula sylvatica, Lycopersicon spp. (e.g. Lycopersicon esculentum, Lycopersicon lycopersicum, Lycopersicon pyriforme), Macrotyloma spp., Malus spp., Malpighia emarginata, Mammea americana, Mangifera indica, Manihot spp., Manilkara zapota, Medicago sativa, Melilotus spp., Mentha spp., Miscanthus sinensis, Momordica spp., Morus nigra, Musa spp., Nicotiana spp., Olea spp., Opuntia spp., Ornithopus spp., Oryza spp. (e.g. Oryza sativa, Oryza latifolia), Panicum miliaceum, Panicum virgatum, Passiflora edulis, Pastinaca sativa, Pennisetum sp., Persea spp., Petroselinum crispum, Phalaris arundinacea, Phaseolus spp., Phleum pratense, Phoenix spp., Phragmites australis, Physalis spp., Pinus spp., Pistacia vera, Pisum spp., Poa spp., Populus spp., Prosopis spp., Prunus spp., Psidium spp., Punica granatum, Pyrus communis, Quercus spp., Raphanus sativus, Rheum rhabarbarum, Ribes spp., Ricinus communis, Rubus spp., Saccharum spp., Salix sp., Sambucus spp., Secale cereale, Sesamum spp., Sinapis sp., Solanum spp. (e.g. Solanum tuberosum, Solanum integrifolium or Solanum lycopersicum), Sorghum bicolor, Spinacia spp., Syzygium spp., Tagetes spp., Tamarindus indica, Theobroma cacao, Trifolium spp., Tripsacum dactyloides, Triticosecale rimpaui, Triticum spp. (e.g. Triticum aestivum, Triticum durum, Triticum turgidum, Triticum hybernum, Triticum macha, Triticum sativum, Triticum monococcum or Triticum vulgare), Tropaeolum minus, Tropaeolum majus, Vaccinium spp., Vicia spp., Vigna spp., Viola odorata, Vitis spp., Zea mays, Zizania palustris, Ziziphus spp., amongst others.

### Control Plant(s)

[0165] The choice of suitable control plants is a routine part of an experimental setup and may include corresponding wild type plants or corresponding plants without the gene of interest. The control plant is typically of the same plant species or even of the same variety as the plant to be assessed. The control plant may also be a nullizygote of the plant to be assessed. Nullizygotes are individuals missing the transgene by segregation. A “control plant” as used herein refers not only to whole plants, but also to plant parts, including seeds and seed parts.

### DETAILED DESCRIPTION OF THE INVENTION

[0166] Surprisingly, it has now been found that modulating expression in a plant of a nucleic acid encoding an SGT1 polypeptide gives plants having enhanced yield-related traits relative to control plants. According to a first embodiment, the present invention provides a method for enhancing yield-related traits in plants relative to control plants, comprising modulating expression in a plant of a nucleic acid encoding an SGT1 polypeptide and optionally selecting for plants having enhanced yield-related traits.

[0167] The invention also provides hitherto unknown SGT1-encoding nucleic acids and SGT1 polypeptides useful for conferring enhanced yield-related traits in plants relative to control plants.

[0168] Furthermore, it has now surprisingly been found that modulating expression in a plant of a nucleic acid encoding a CLC-pKG polypeptide gives plants having enhanced yield-related traits relative to control plants. According to a first embodiment, the present invention provides a method for enhancing yield-related traits in plants relative to control plants, comprising modulating expression in a plant of a nucleic acid encoding a CLC-pKG polypeptide and optionally selecting for plants having enhanced yield-related traits.

[0169] Furthermore, it has now surprisingly been found that modulating expression in a plant of a nucleic acid encoding a HD-hydrolase-like polypeptide gives plants having enhanced yield-related traits relative to control plants. According to a first embodiment, the present invention provides a method for enhancing yield-related traits in plants relative to control plants, comprising modulating expression in a plant of a nucleic acid encoding a HD-hydrolase-like polypeptide and optionally selecting for plants having enhanced yield-related traits.

[0170] A preferred method for modulating (preferably, increasing) expression of a nucleic acid encoding an SGT1 polypeptide, or a CLC-pKG polypeptide, or a HD-hydrolase-like polypeptide, is by introducing and expressing in a plant a nucleic acid encoding an SGT1 polypeptide, or a CLC-pKG polypeptide, or a HD-hydrolase-like polypeptide respectively.

[0171] In one embodiment a “protein useful in the methods of the invention” is taken to mean an SGT1 polypeptide as defined herein. Any reference hereinafter to a “nucleic acid useful in the methods of the invention” is taken to mean a nucleic acid capable of encoding such an SGT1 polypeptide. The nucleic acid to be introduced into a plant (and therefore useful in performing the methods of the invention) is any nucleic acid encoding the type of protein which will now be described, hereinafter also named “SGT1 nucleic acid” or “SGT1 gene”.

[0172] An “SGT1 polypeptide” as defined herein refers to any polypeptide comprising the following in any order:
[0173] 1. at least one tetratricopeptide (TPR) repeat;
[0174] 2. at least one CS domain; and
[0175] 3. an SGS domain.

[0176] The TPR is a structural motif involved in the mediation of protein-protein interactions and the assembly of multiprotein complexes. PFam Accession number PF00515 represents TPRs. See also Interpro Accession number IPRO01440 for further information on TPRs. SGT1 polypeptides useful in the methods of the invention comprise at least one TPR, preferably two TPRs and most preferably three TPRs.

[0177] The first TPR is a Type 1 TPR (TPR1) and is represented by the sequence given below or by a sequence having in increasing order of preference at least 70%, 71%, 72%, 73%, 74%, 75%, 76%, 77%, 78%, 79%, 80%, 81%, 82%, 83%, 84%, 85%, 86%, 87%, 88%, 89%, 90%, 91%, 92%, 93%, 94%, 95%, 96%, 97%, 98%, or 99% or more sequence identity to the sequence of TPR1.

| (SEQ ID NO: 37) | |
|---|---|
| TPR1: | SKAYLRKGLACMKLEEYQTAKAALETGASLAPGE |

[0178] The second TPR is a Type 2 TPR (TPR2) and is represented by the sequence given below or by a sequence having in increasing order of preference at least 70%, 71%, 72%, 73%, 74%, 75%, 76%, 77%, 78%, 79%, 80%, 81%, 82%, 83%, 84%, 85%, 86%, 87%, 88%, 89%, 90%, 91%, 92%, 93%, 94%, 95%, 96%, 97%, 98%, or 99% or more sequence identity to the sequence of TPR2a.

| (SEQ ID NO: 38) | |
|---|---|
| TPR2a: | ASDLETRAKEAFIDDHFELAVDLYTQAISLSPKN |

[0179] The third TPR is also a Type 2 TPR (TPR2) is represented by the sequence given below or by a sequence having in increasing order of preference at least 70%, 71%, 72%, 73%, 74%, 75%, 76%, 77%, 78%, 79%, 80%, 81%, 82%, 83%, 84%, 85%, 86%, 87%, 88%, 89%, 90%, 91%, 92%, 93%, 94%, 95%, 96%, 97%, 98%, or 99% or more sequence identity to the sequence of TPR2b.

| (SEQ ID NO: 39) | |
|---|---|
| TPR2b: | PELFADRAQANIKLNYFTEAVVDANKAIELDPYM |

[0180] PFam Accession number PF04969 represents CS domains. See also Interpro Accession number IPRO17447 for further information on CS domains. The CS domain is represented by the sequence below or by a sequence having in increasing order of preference at least 70%, 71%, 72%, 73%, 74%, 75%, 76%, 77%, 78%, 79%, 80%, 81%, 82%, 83%, 84%, 85%, 86%, 87%, 88%, 89%, 90%, 91%, 92%, 93%, 94%, 95%, 96%, 97%, 98%, or 99% or more sequence identity to the sequence below.

CS Domain:
(SEQ ID NO: 40)
YRHEFYQKPEEVVVTIFAKGIPAKNVVVDFGEQILSVSIDLPGGETYSFQ
PRLFGKITPAKCRYEVMSTKIEIRLAK

[0181] PFam Accession number PF05002 represents SGS domains. See also Interpro Accession number IPRO07699 for further information on SGS domains. The SGS domain is represented by the sequence below or by a sequence having in increasing order of preference at least 70%, 71%, 72%, 73%, 74%, 75%, 76%, 77%, 78%, 79%, 80%, 81%, 82%, 83%, 84%, 85%, 86%, 87%, 88%, 89%, 90%, 91%, 92%, 93%, 94%, 95%, 96%, 97%, 98%, or 99% or more sequence identity to the sequence below.

SGS Domain:
(SEQ ID NO: 41)
NVDWDKLEAQVKKEEKDEKLDGDAALNKFFRDIYKDADEDTRRAMMKSF
VESNGTVLSTNWKKVGTKKVEGSPPDGMELKKW

[0182] According to a preferred feature of the present invention, SGT1 polypeptides useful in the methods of the invention may comprise any one or more of Motifs 1 to 8 as defined below:

### Motif 1:

[0183] DLETRAKEAFIDDHFELAVDLYTQAI, or a sequence having in increasing order of preference at least 70%, 71%, 72%, 73%, 74%, 75%, 76%, 77%, 78%, 79%, 80%, 81%, 82%, 83%, 84%, 85%, 86%, 87%, 88%, 89%, 90%, 91%, 92%, 93%, 94%, 95%, 96%, 97%, 98%, or 99% or more sequence identity to the sequence of Motif 1 (SEQ ID NO: 42).

### Motif 2:

[0184] ADRAQANIKL, or a sequence having in increasing order of preference at least 70%, 71%, 72%, 73%, 74%, 75%, 76%, 77%, 78%, 79%, 80%, 81%, 82%, 83%, 84%, 85%, 86%, 87%, 88%, 89%, 90%, 91%, 92%, 93%, 94%, 95%, 96%, 97%, 98%, or 99% or more sequence identity to the sequence of Motif 2 (SEQ ID NO: 43).

### Motif 3:

[0185] LEEYQTAKAALETGAS, or a sequence having in increasing order of preference at least 70%, 71%, 72%, 73%, 74%, 75%, 76%, 77%, 78%, 79%, 80%, 81%, 82%, 83%, 84%, 85%, 86%, 87%, 88%, 89%, 90%, 91%, 92%, 93%, 94%, 95%, 96%, 97%, 98%, or 99% or more sequence identity to the sequence of Motif 3 (SEQ ID NO: 44).

### Motif 4:

[0186] KYRHEFYQKPEEVVVTIFAKGIP, or a sequence having in increasing order of preference at least 70%, 71%, 72%, 73%, 74%, 75%, 76%, 77%, 78%, 79%, 80%, 81%, 82%, 83%, 84%, 85%, 86%, 87%, 88%, 89%, 90%, 91%, 92%, 93%, 94%, 95%, 96%, 97%, 98%, or 99% or more sequence identity to the sequence of Motif 4 (SEQ ID NO: 45).

### Motif 5:

[0187] QPRLFGKITPAKCRYEVMSTKIEIRLAKAE, or a sequence having in increasing order of preference at least 70%, 71%, 72%, 73%, 74%, 75%, 76%, 77%, 78%, 79%, 80%, 81%, 82%, 83%, 84%, 85%, 86%, 87%, 88%, 89%, 90%, 91%, 92%, 93%, 94%, 95%, 96%, 97%, 98%, or 99% or more sequence identity to the sequence of Motif 5 (SEQ ID NO: 46).

### Motif 6:

[0188] EAQVKKEEKDEKLDGDA, or a sequence having in increasing order of preference at least 70%, 71%, 72%, 73%, 74%, 75%, 76%, 77%, 78%, 79%, 80%, 81%, 82%, 83%, 84%, 85%, 86%, 87%, 88%, 89%, 90%, 91%, 92%, 93%, 94%, 95%, 96%, 97%, 98%, or 99% or more sequence identity to the sequence of Motif 6 (SEQ ID NO: 47).

### Motif 7:

[0189] ALNKFFRDIYKDADEDTRRAMMKSFVESNGTVLSTNWKKVGTKKVEG, or a sequence having in increasing order of preference at least 70%, 71%, 72%, 73%, 74%, 75%, 76%, 77%, 78%, 79%, 80%, 81%, 82%, 83%, 84%, 85%, 86%, 87%, 88%, 89%, 90%, 91%, 92%, 93%, 94%, 95%, 96%, 97%, 98%, or 99% or more sequence identity to the sequence of Motif 7 (SEQ ID NO: 48).

### Motif 8:

[0190] SPPDGMELKKWEI, or a sequence having in increasing order of preference at least 70%, 71%, 72%, 73%, 74%, 75%, 76%, 77%, 78%, 79%, 80%, 81%, 82%, 83%, 84%, 85%, 86%, 87%, 88%, 89%, 90%, 91%, 92%, 93%, 94%, 95%, 96%, 97%, 98%, or 99% or more sequence identity to the sequence of Motif 8 (SEQ ID NO: 49).

[0191] Preferably, the SGT1 polypeptide comprises in increasing order of preference, at least 2, at least 3, at least 4, at least 5, at least 6, at least 7 or all 8 of the motifs as defined above.

[0192] Additionally, SGT1 polypeptides typically have in increasing order of preference at least 25%, 26%, 27%, 28%, 29%, 30%, 31%, 32%, 33%, 34%, 35%, 36%, 37%, 38%, 39%, 40%, 41%, 42%, 43%, 44%, 45%, 46%, 47%, 48%, 49%, 50%, 51%, 52%, 53%, 54%, 55%, 56%, 57%, 58%, 59%, 60%, 61%, 62%, 63%, 64%, 65%, 66%, 67%, 68%, 69%, 70%, 71%, 72%, 73%, 74%, 75%, 76%, 77%, 78%, 79%, 80%, 81%, 82%, 83%, 84%, 85%, 86%, 87%, 88%, 89%, 90%, 91%, 92%, 93%, 94%, 95%, 96%, 97%, 98%, or 99% overall sequence identity to the amino acid represented by SEQ ID NO: 2.

[0193] The overall sequence identity is determined using a global alignment algorithm, such as the Needleman Wunsch algorithm in the program GAP (GCG Wisconsin Package, Accelrys), preferably with default parameters and preferably with sequences of mature proteins (i.e. without taking into account secretion signals or transit peptides). Compared to overall sequence identity, the sequence identity will generally be higher when only conserved domains or motifs are considered.

[0194] Preferably, the polypeptide sequence which when used in the construction of a phylogenetic tree, such as the one depicted in FIG. 2, clusters with the group of SGT1 polypeptides comprising the amino acid sequence represented by SEQ ID NO: 2 rather than with any other group.

[0195] In another embodiment a “protein useful in the methods of the invention” is taken to mean a CLC-pKG polypeptide as defined herein. Any reference hereinafter to a “nucleic acid useful in the methods of the invention” is taken to mean a nucleic acid capable of encoding such a CLC-pKG polypeptide. The nucleic acid to be introduced into a plant (and therefore useful in performing the methods of the invention) is any nucleic acid encoding the type of protein which will now be described, hereafter also named “CLC-pKG nucleic acid” or “CLC-pKG gene”.

[0196] A “CLC-pKG polypeptide” as defined herein refers to any polypeptide comprising a Voltage CLC domain (Pfam entry PF00654) and C-terminally thereof a CBS domain (Pfam entry PF00571; Interpro entry IPRO00644) and optionally a USP domain (Pfam entry PF00582; Interpro entry IPRO06016). CLC-pKG polypeptides are part of a family of voltage-gated channels that is highly conserved over various kingdoms of life and are structurally unrelated to the other known voltage-gated channels. They are found in organisms ranging from bacteria to yeasts and plants, and also in animals. CLC-pKG polypeptides typically have 10 or 12 transmembrane (TM) domains, occasionally less than 10 TM domains or more than 12, up to 18 or 20 TM domains may occur. The CLC-pKG polypeptide represented by the Arabidopsis AtCLCe and AtCLCf proteins show up to 12 membrane-spanning domains Marmagne et al. 2007. CBS (cystathionine-beta-synthase) domains are small intracellular modules, mostly found in two or four copies within a protein (two copies for CLC-pKG proteins), and are present in several different proteins in all kingdoms of life. Tandem pairs of CBS domains, also called Baeteman domains, can act as binding domains for adenosine derivatives and may regulate the activity of attached enzymatic or other domains. Typically CBS domains in CLC-pKG polypeptides are proposed to play a role as a sensor for the energy status of the cell. USP (Universal Stress Protein) domains are conserved protein regions present in proteins whose expression in nature is typically enhanced when the cell is exposed to stress agents. It was first characterized in the universal stress protein UspA (Nystrom T, Neidhardt FC. Mol. Microbiol. 11 537-44 1994), which is proposed to have a a general “stress endurance” activity in E. coli.

[0197] Preferably, the CLC-pKG polypeptide useful in the methods of the present inventions comprises a domain having in increasing order of preference at least 25%, 26%, 27%, 28%, 29%, 30%, 31%, 32%, 33%, 34%, 35%, 36%, 37%, 38%, 39%, 40%, 41%, 42%, 43%, 44%, 45%, 46%, 47%, 48%, 49%, 50%, 51%, 52%, 53%, 54%, 55%, 56%, 57%, 58%, 59%, 60%, 61%, 62%, 63%, 64%, 65%, 66%, 67%, 68%, 69%, 70%, 71%, 72%, 73%, 74%, 75%, 76%, 77%, 78%, 79%, 80%, 81%, 82%, 83%, 84%, 85%, 86%, 87%, 88%, 89%, 90%, 91%, 92%, 93%, 94%, 95%, 96%, 97%, 98%, 99% or 100% sequence identity to:
[0198] (i) a CLC in SEQ ID NO: 54 as represented by the sequence located between amino acids 77 and 422 of SEQ ID NO: 54;
[0199] (ii) a CBS domain in SEQ ID NO: 54 as represented by the sequence located between amino acids 455 to 510 or 516 to 571 of SEQ ID NO: 54; and optionally
[0200] (iii) a USP domain in SEQ ID NO: 54 as represented by the sequence located between amino acids 597-731 of SEQ ID NO: 54.

[0201] Preferably, the CLC-pKG polypeptide useful in the methods of the present inventions comprises one or more of motifs 9 or 10:
[0202] (i) Motif 9: P(T/S)(V/I)(H/Q)(I/V)GA(A/S/G)LA;
[0203] (ii) Motif 10: (P/S)GG(I/L/V)(F/L)XP(A/S/T)LX(L/M)G(S/A/T)XLG
   Wherein up to one, two, three, four, five, six, seven amino acids maybe substituted by any amino acid preferably by a semiconservative amino acid more preferably by a conservative amino acid.

[0204] Additionally or alternatively, the CLC-pKG polypeptide useful in the methods of the invention or a homologue thereof has in increasing order of preference at least 25%, 26%, 27%, 28%, 29%, 30%, 31%, 32%, 33%, 34%, 35%, 36%, 37%, 38%, 39%, 40%, 41%, 42%, 43%, 44%, 45%, 46%, 47%, 48%, 49%, 50%, 51%, 52%, 53%, 54%, 55%, 56%, 57%, 58%, 59%, 60%, 61%, 62%, 63%, 64%, 65%, 66%, 67%, 68%, 69%, 70%, 71%, 72%, 73%, 74%, 75%, 76%, 77%, 78%, 79%, 80%, 81%, 82%, 83%, 84%, 85%, 86%, 87%, 88%, 89%, 90%, 91%, 92%, 93%, 94%, 95%, 96%, 97%, 98%, 99% or 100% overall sequence identity to the amino acid represented by any one of the polypeptides of Table A2, preferably by SEQ ID NO: 54, provided that the polypeptide comprises the conserved domains as outlined above. The overall sequence identity is determined using a global alignment algorithm, such as the Needleman Wunsch algorithm in the program GAP (GCG Wisconsin Package, Accelrys), preferably with default parameters and preferably with sequences of mature proteins (i.e. without taking into account secretion signals or transit peptides). Compared to overall sequence identity, the sequence identity will generally be higher when only conserved domains or motifs are considered.

[0205] In a preferred embodiment the CLC-pKG nucleic acid and/or polypeptide useful in the methods of the invention is of natural origin, more of plant origin, most preferably of prokaryotic origin. Preferred plant CLC-pKG polypeptides are AtCIC-e (At4g35440) and AtCIC-f (At1g55620) as described by Marmagne et al 2007 and having the locus number or Spinach CLCf as described by Teardo et al. 2005 FEBS Letters 579 (2005) 4991-4996. As described by Teardo et al. 2005, AtCIC-f and AtCIC-e are close related in sequence structure to cyanobacterial CIC channels (See Table 1 of Teardo et al. 2005). in particular the similarity with the Synechocystis sp. PCC 6803 protein, s111864, the sequence similarity is of 20% with AtCIC-e and of 21% with AtCIC-f. Preferred prokaryotic CLC-pKG polypeptides are the polypeptides of Synechocystis species, more preferably of Synechocystis sp. PCC 6803, most preferably polypeptide sll1864 of Synechocystis sp. PCC 6803, herein provided under SEQ ID NO: 54.

[0206] Alternatively or additonaly, the CLC-pKG polypeptide sequence useful in the methods of the invention when used in the construction of a phylogenetic tree, such as the one depicted in FIG. 1 of Marmagne et al. 2007 (herein incorporated by reference), clusters with the group of CLC polypeptides of bacterial origin, preferably with SCLC (P74477) from Synechocystis sp.; or with the group of plant origin comprising AtCLCe and AtCLCf than with any other anion group. FIG. 1 of Marmagne et al. 2007 is given in FIG. 6 herein.

[0207] Furthermore, CLC-like polypeptides (at least in their native form) typically have nitrate/H⁺ exchanging activity. Tools and techniques for measuring anion transporting activity are well known in the art, for example by complementation of yeast mutants (Marmagne et al., J. Exp. Bot. 58, 3385-3393, 2007) or complementation of Arabidopsis mutants (De Angeli, 2009). Further details are provided in the Example section.

[0208] Selectivity of CLC chloride channels for different anions vary amongst classes of CLC proteins. Thus AtCLCa of Arabidopsis thaliana, closer to CLC proteins of eukaryotic origin (see FIG. 6) was shown to have a higher selectivity for NO3— anions than for Chloride, Cl—. A further preferred CLC-pKG polypeptide useful in the methods of the invention has a higher selectivity for Chloride than for Nitrate anions.

[0209] Plant CLC polypeptides are localized to membranes, with different classes of CLC localized to different membranes, for example to the plasma, the tonoplast, the chloroplast or the golgi membranes. A yet further preferred CLC-pKG polypeptide useful in the methods of the invention localizes to the Golgi or to the Thylakoid membranes when expressed in a plant cell.

[0210] In addition or alternatively, CLC-pKG polypeptides, when expressed in rice according to the methods of the present invention as outlined in the Examples section herein give plants having increased yield related traits in comparison to control plants, in particular an increase in any one or more of seed yield, harvest index, height of the plant, leaf biomass when grown under non-stress conditions.

[0211] In yet another embodiment a “protein useful in the methods of the invention” is taken to mean a HD-hydrolase-like polypeptide as defined herein. Any reference hereinafter to a “nucleic acid useful in the methods of the invention” is taken to mean a nucleic acid capable of encoding such a HD-hydrolase-like polypeptide. The nucleic acid to be introduced into a plant (and therefore useful in performing the methods of the invention) is any nucleic acid encoding the type of protein which will now be described, hereafter also named “HD-hydrolase-like nucleic acid” or “HD-hydrolase-like gene”.

[0212] A “HD-hydrolase-like polypeptide” as defined herein refers to a protein comprising the CRISPR-associated protein Crm2 domain (InterPro accession IPRO13407). Preferably the HD-hydrolase-like protein comprises one or more of the following motifs:
[0213] Motif 11 (SEQ ID NO: 148): (A/G/S/Q)(R/Y/F/L)(L/F/N)H(D/S)(P/S)(A/P/L)
[0214] Preferably, motif 11 is (G/A)LLHDPA
[0215] Motif 12 (SEQ ID NO: 149): P(A/Q)(D/E/H)(T/Y/S)(R/I)(I/F/A/L)P(D/N)
[0216] Preferably, motif 12 is PA(D/E)TR(I/F/A/L)P(D/N)
[0217] Motif 13 (SEQ ID NO: 150): (T/S)(L/I/F)(G/S/N)P(V/I)Q(E/S/Q/D/R)(L/F/Y)I
[0218] Preferably, motif 13 is (T/S)(L/I/F)(G/S)P(V/I)Q(E/S)(L/F/Y)I
[0219] Motif 14 (SEQ ID NO: 151): D(L/F)(W/Y/F)(A/W/M/T)(G/S)S(H/Y/W/F/M)(L/I/M)L(A/S/H)(R/Y/D)(L/F).
[0220] Preferably, motif 14 is D(L/F)(W/Y/F)(A/W/M/T)GS(H/Y/W)(L/I/M)L(A/S/H)(R/Y)(L/F)
[0221] Motif 15 (SEQ ID NO: 152): (L/I/V)(F/Y/T)PXL
[0222] Wherein X can be any amino acid but preferably one of Q, R, E, N, S, C or D
[0223] Motif 16 (SEQ ID NO: 153): (L/M/F/I)PN(R/V/T)(F/I/L)
[0224] Motif 17 (SEQ ID NO: 154): (M/L/G/F)DGDX(M/I)
[0225] Wherein X can be any amino acid but preferably one of R, Y, N, H, G, S or D
[0226] Preferably, motif 7 is GDGD(G/S/D)M
[0227] Motif 18 SEQ ID NO: 155): (S/T/G/A)P(A/G/S/T)(R/V/L/T/I)H(L/S/Q/N/V/A)(A/L/T/G/F) (I/L/V) (S/N) (G/E/R/L)
[0228] Motif 19 (SEQ ID NO: 156): G(R/K)(V/L)(L/I/V)Y(A/S)GGDD(L/V)(M/F/L)(A/T)
[0229] Motif 20 (SEQ ID NO: 157): (T/S)(A/M/I/L)S(M/A/F/C/L)G(A/V/I/L)(V/T/A)I(A/V/G)(H/D) (H/Y/K)(K/Q/S)

[0230] Additionally or alternatively, the HD-hydrolase-like polypeptide comprises one or more of the following motifs:
[0231] Motif 21 (SEQ ID NO: 158): IKASRK(F/I/M)(L/R/K)DFWAGS(Y/W)(L/I)LHYLSA
[0232] Motif 22 (SEQ ID NO: 159): L(A/L)TAGFPN
[0233] Motif 23 (SEQ ID NO: 160): GLFDG(S/T/R/I)E(M/K/Q)LNA(L/T)E(L/I/T)(T/V/L)KR
[0234] Motif 24 (SEQ ID NO: 161): KRMGP(A/S)TH(V/S/N)(G/A)L(N/S)RALLDFS
[0235] Motif 25 (SEQ ID NO: 162): Y(S/A)GGDDV
[0236] Motif 26 (SEQ ID NO: 163): LFT(M/L)G(F/K/S/Q/D)(G/C/L/A/N)A(T/S)(M/I)S(L/F)G (I/V/L)(V/T)I(V/A)(D/H)(K/H)S(V/I)PL(P/A)(V/I)ALE(A/S/N)LW(E/Q)AE

[0237] More preferably, the HD-hydrolase-like polypeptide comprises in increasing order of preference, at least 2, at least 3, at least 4, at least 5, at least 6, at least 7, at least 8, at least 9, at least 10, at least 11, at least 12, at least 13, at least 14, at least 15, or all 16 motifs.

[0238] Additionally or alternatively, the homologue of a HD-hydrolase-like protein has in increasing order of preference at least 25%, 26%, 27%, 28%, 29%, 30%, 31%, 32%, 33%, 34%, 35%, 36%, 37%, 38%, 39%, 40%, 41%, 42%, 43%, 44%, 45%, 46%, 47%, 48%, 49%, 50%, 51%, 52%, 53%, 54%, 55%, 56%, 57%, 58%, 59%, 60%, 61%, 62%, 63%, 64%, 65%, 66%, 67%, 68%, 69%, 70%, 71%, 72%, 73%, 74%, 75%, 76%, 77%, 78%, 79%, 80%, 81%, 82%, 83%, 84%, 85%, 86%, 87%, 88%, 89%, 90%, 91%, 92%, 93%, 94%, 95%, 96%, 97%, 98%, or 99% overall sequence identity to the amino acid represented by SEQ ID NO: 119, provided that the homologous protein comprises any one or more of the conserved motifs as outlined above. The overall sequence identity is determined using a global alignment algorithm, such as the Needleman Wunsch algorithm in the program GAP (GCG Wisconsin Package, Accelrys), preferably with default parameters and preferably with sequences of mature proteins (i.e. without taking into account secretion signals or transit peptides). Compared to overall sequence identity, the sequence identity will generally be higher when only conserved domains or motifs are considered. Preferably the motifs in a HD-hydrolase-like polypeptide have, in increasing order of preference, at least 70%, 71%, 72%, 73%, 74%, 75%, 76%, 77%, 78%, 79%, 80%, 81%, 82%, 83%, 84%, 85%, 86%, 87%, 88%, 89%, 90%, 91%, 92%, 93%, 94%, 95%, 96%, 97%, 98%, or 99% sequence identity to any one or more of the motifs represented by SEQ ID NO: 148 to SEQ ID NO: 163 (Motifs 11 to 26).

[0239] Preferably, the polypeptide sequence which when used in the construction of a phylogenetic tree, such as the one depicted in FIG. 10, clusters with the group of HD-hydrolase-like polypeptides comprising the amino acid sequence represented by SEQ ID NO: 119 rather than with any other group.

[0240] HD-hydrolase-like polypeptides, when expressed in rice according to the methods of the present invention as outlined in Examples 6 and 7, give plants having increased yield related traits, such as increased seed yield.

[0241] The terms “domain”, “signature” and “motif” are defined in the “definitions” section herein.

[0242] Concerning SGT1 polypeptides, the present invention is illustrated by transforming plants with the nucleic acid sequence represented by SEQ ID NO: 1, encoding the polypeptide sequence of SEQ ID NO: 2. However, performance of the invention is not restricted to these sequences; the methods of the invention may advantageously be performed using any SGT1-encoding nucleic acid or SGT1 polypeptide as defined herein.

[0243] Examples of nucleic acids encoding SGT1 polypeptides are given in Table A1 of the Examples section herein. Such nucleic acids are useful in performing the methods of the invention. The amino acid sequences given in Table A1 of the Examples section are example sequences of orthologues and paralogues of the SGT1 polypeptide represented by SEQ ID NO: 2, the terms “orthologues” and “paralogues” being as defined herein. Further orthologues and paralogues may readily be identified by performing a so-called reciprocal blast search as described in the definitions section; where the query sequence is SEQ ID NO: 1 or SEQ ID NO: 2, the second BLAST (back-BLAST) would be against Capsicum sequences.

[0244] Concerning CLC-pKG polypeptides, the present invention is illustrated by transforming plants with the nucleic acid sequence represented by SEQ ID NO: 53, encoding the polypeptide sequence of SEQ ID NO: 54. However, performance of the invention is not restricted to these sequences; the methods of the invention may advantageously be performed using any CLC-pKG-encoding nucleic acid or CLC-pKG polypeptide as defined herein.

[0245] Examples of nucleic acids encoding CLC-pKG polypeptides are given in Table A2 of the Examples section herein. Such nucleic acids are useful in performing the methods of the invention. The amino acid sequences given in Table A2 of the Examples section are example sequences of orthologues and paralogues of the CLC-pKG polypeptide represented by SEQ ID NO: 54, the terms “orthologues” and “paralogues” being as defined herein. Further orthologues and paralogues may readily be identified by performing a so-called reciprocal blast search as described in the definitions section; where the query sequence is SEQ ID NO: 53 or SEQ ID NO: 54, the second BLAST (back-BLAST) would be against rice sequences.

[0246] Concerning HD-hydrolase-like polypeptides, the present invention is illustrated by transforming plants with the nucleic acid sequence represented by SEQ ID NO: 118, encoding the polypeptide sequence of SEQ ID NO: 119. However, performance of the invention is not restricted to these sequences; the methods of the invention may advantageously be performed using any HD-hydrolase-like-encoding nucleic acid or HD-hydrolase-like polypeptide as defined herein.

[0247] Examples of nucleic acids encoding HD-hydrolase-like polypeptides are given in Table A3 of the Examples section herein. Such nucleic acids are useful in performing the methods of the invention. The amino acid sequences given in Table A3 of the Examples section are example sequences of orthologues and paralogues of the HD-hydrolase-like polypeptide represented by SEQ ID NO: 119, the terms “orthologues” and “paralogues” being as defined herein. Further orthologues and paralogues may readily be identified by performing a so-called reciprocal blast search as described in the definitions section; where the query sequence is SEQ ID NO: 118 or SEQ ID NO: 119, the second BLAST (back-BLAST) would be against Synechocystis sequences.

[0248] Nucleic acid variants may also be useful in practising the methods of the invention. Examples of such variants include nucleic acids encoding homologues and derivatives of any one of the amino acid sequences given in Table A1 to A3 of the Examples section, the terms “homologue” and “derivative” being as defined herein. Also useful in the methods of the invention are nucleic acids encoding homologues and derivatives of orthologues or paralogues of any one of the amino acid sequences given in Table A1 to A3 of the Examples section. Homologues and derivatives useful in the methods of the present invention have substantially the same biological and functional activity as the unmodified protein from which they are derived. Further variants useful in practising the methods of the invention are variants in which codon usage is optimised or in which miRNA target sites are removed.

[0249] Further nucleic acid variants useful in practising the methods of the invention include portions of nucleic acids encoding SGT1 polypeptides, or CLC-pKG polypeptides, or HD-hydrolase-like polypeptides, nucleic acids hybridising to nucleic acids encoding SGT1 polypeptides, or CLC-pKG polypeptides, or HD-hydrolase-like polypeptides, splice variants of nucleic acids encoding SGT1 polypeptides, or CLC-pKG polypeptides, or HD-hydrolase-like polypeptides, allelic variants of nucleic acids encoding SGT1 polypeptides and variants of nucleic acids encoding SGT1 polypeptides, or CLC-pKG polypeptides, or HD-hydrolase-like polypeptides, obtained by gene shuffling. The terms hybridising sequence, splice variant, allelic variant and gene shuffling are as described herein.

[0250] Nucleic acids encoding SGT1 polypeptides, or CLC-pKG polypeptides, or HD-hydrolase-like polypeptides, need not be full-length nucleic acids, since performance of the methods of the invention does not rely on the use of full-length nucleic acid sequences. According to the present invention, there is provided a method for enhancing yield-related traits in plants, comprising introducing and expressing in a plant a portion of any one of the nucleic acid sequences given in Table A1 to A3 of the Examples section, or a portion of a nucleic acid encoding an orthologue, paralogue or homologue of any of the amino acid sequences given in Table A1 to A3 of the Examples section.

[0251] A portion of a nucleic acid may be prepared, for example, by making one or more deletions to the nucleic acid. The portions may be used in isolated form or they may be fused to other coding (or non-coding) sequences in order to, for example, produce a protein that combines several activities. When fused to other coding sequences, the resultant polypeptide produced upon translation may be bigger than that predicted for the protein portion.

[0252] Concerning SGT1 polypeptides, portions useful in the methods of the invention, encode a SGT1 polypeptide as defined herein, and have substantially the same biological activity as the amino acid sequences given in Table A1 of the Examples section. Preferably, the portion is a portion of any one of the nucleic acids given in Table A1 of the Examples section, or is a portion of a nucleic acid encoding an orthologue or paralogue of any one of the amino acid sequences given in Table A1 of the Examples section. Preferably the portion is at least 500, 550, 600, 650, 700, 750, 800, 850, 900, 950, 1000 consecutive nucleotides in length, the consecutive nucleotides being of any one of the nucleic acid sequences given in Table A1 of the Examples section, or of a nucleic acid encoding an orthologue or paralogue of any one of the amino acid sequences given in Table A1 of the Examples section. Most preferably the portion is a portion of the nucleic acid of SEQ ID NO: 1. Preferably, the portion encodes a fragment of an amino acid sequence which, when used in the construction of a phylogenetic tree, clusters with the group of SGT1 polypeptides comprising the amino acid sequence represented by SEQ ID NO: 2 rather than with any other.

[0253] Concerning CLC-pKG polypeptides, portions useful in the methods of the invention, encode a CLC-pKG polypeptide as defined herein, and have substantially the same biological activity as the amino acid sequences given in Table A2 of the Examples section. Preferably, the portion is a portion of any one of the nucleic acids given in Table A2 of the Examples section, or is a portion of a nucleic acid encoding an orthologue or paralogue of any one of the amino acid sequences given in Table A2 of the Examples section. Preferably the portion is at least 100, 200, 300, 400, 500, 550, 600, 650, 700, 750, 800, 850, 900, 950, 1000 consecutive nucleotides in length, the consecutive nucleotides being of any one of the nucleic acid sequences given in Table A2 of the Examples section, or of a nucleic acid encoding an orthologue or paralogue of any one of the amino acid sequences given in Table A2 of the Examples section. Most preferably the portion is a portion of the nucleic acid of SEQ ID NO: 53. Preferably, the portion encodes a fragment of an amino acid sequence which, when used in the construction of a phylogenetic tree, such as the one depicted in FIG. 1 of Marmagne et al. 2007 (herein incorporated by reference), clusters with the group of CLC polypeptides of bacterial origin, preferably with SCLC (P74477) from Synechocystis sp.; or with the group of plant origin comprising AtCLCe and AtCLCf than with any other anion group.

[0254] Concerning HD-hydrolase-like polypeptides, portions useful in the methods of the invention, encode a HD-hydrolase-like polypeptide as defined herein, and have substantially the same biological activity as the amino acid sequences given in Table A3 of the Examples section. Preferably, the portion is a portion of any one of the nucleic acids given in Table A3 of the Examples section, or is a portion of a nucleic acid encoding an orthologue or paralogue of any one of the amino acid sequences given in Table A3 of the Examples section. Preferably the portion is at least 1000, 1100, 1200, 1300, 1400, 1500, 1600, 1700, 1800, 1900, 2000, 2100, 2200, 2300, 2400, 2500, 2600, 2700, 2800, 2900, 3000, 3100, 3200, 3300, 3400, 3500, 3600, 3700 consecutive nucleotides in length, the consecutive nucleotides being of any one of the nucleic acid sequences given in Table A3 of the Examples section, or of a nucleic acid encoding an orthologue or paralogue of any one of the amino acid sequences given in Table A3 of the Examples section. Most preferably the portion is a portion of the nucleic acid of SEQ ID NO: 118. Preferably, the portion encodes a fragment of an amino acid sequence which, when used in the construction of a phylogenetic tree, such as the one depicted in FIG. 10, clusters with the group of HD-hydrolase-like polypeptides comprising the amino acid sequence represented by SEQ ID NO: 119 rather than with any other group and/or comprises any one or more of the motifs 11 to 26 defined above.

[0255] Another nucleic acid variant useful in the methods of the invention is a nucleic acid capable of hybridising, under reduced stringency conditions, preferably under stringent conditions, with a nucleic acid encoding an SGT1 polypeptide, or a CLC-pKG polypeptide, or a HD-hydrolase-like polypeptide, as defined herein, or with a portion as defined herein.

[0256] According to the present invention, there is provided a method for enhancing yield-related traits in plants, comprising introducing and expressing in a plant a nucleic acid capable of hybridizing to any one of the nucleic acids given in Table A1 to A3 of the Examples section, or comprising introducing and expressing in a plant a nucleic acid capable of hybridising to a nucleic acid encoding an orthologue, paralogue or homologue of any of the nucleic acid sequences given in Table A1 to A3 of the Examples section.

[0257] Concerning SGT1 polypeptides, hybridising sequences useful in the methods of the invention encode an SGT1 polypeptide as defined herein, having substantially the same biological activity as the amino acid sequences given in Table A1 of the Examples section. Preferably, the hybridising sequence is capable of hybridising to the complement of any one of the nucleic acids given in Table A1 of the Examples section, or to a portion of any of these sequences, a portion being as defined above, or the hybridising sequence is capable of hybridising to the complement of a nucleic acid encoding an orthologue or paralogue of any one of the amino acid sequences given in Table A1 of the Examples section. Most preferably, the hybridising sequence is capable of hybridising to the complement of a nucleic acid as represented by SEQ ID NO: 1 or to a portion thereof.

[0258] Preferably, the hybridising sequence encodes a polypeptide with an amino acid sequence which, when substantially full-length and used in the construction of a phylogenetic tree, clusters with the group of SGT1 polypeptides comprising the amino acid sequence represented by SEQ ID NO: 2 rather than with any other.

[0259] Concerning CLC-pKG polypeptides, hybridising sequences useful in the methods of the invention encode a CLC-pKG polypeptide as defined herein, having substantially the same biological activity as the amino acid sequences given in Table A2 of the Examples section. Preferably, the hybridising sequence is capable of hybridising to the complement of any one of the nucleic acids given in Table A2 of the Examples section, or to a portion of any of these sequences, a portion being as defined above, or the hybridising sequence is capable of hybridising to the complement of a nucleic acid encoding an orthologue or paralogue of any one of the amino acid sequences given in Table A2 of the Examples section. Most preferably, the hybridising sequence is capable of hybridising to the complement of a nucleic acid as represented by SEQ ID NO: 53 or to a portion thereof.

[0260] Preferably, the hybridising sequence encodes a polypeptide with an amino acid sequence which, when full-length and used in the construction of a phylogenetic tree, such as the one depicted in FIG. 1 of Marmagne et al. 2007 (herein incorporated by reference), clusters with the group of CLC polypeptides of bacterial origin, preferably with SCLC (P74477) from Synechocystis sp.; or with the group of plant origin comprising AtCLCe and AtCLCf than with any other anion group.

[0261] Concerning HD-hydrolase-like polypeptides, hybridising sequences useful in the methods of the invention encode a HD-hydrolase-like polypeptide as defined herein, having substantially the same biological activity as the amino acid sequences given in Table A3 of the Examples section. Preferably, the hybridising sequence is capable of hybridising to the complement of any one of the nucleic acids given in Table A3 of the Examples section, or to a portion of any of these sequences, a portion being as defined above, or the hybridising sequence is capable of hybridising to the complement of a nucleic acid encoding an orthologue or paralogue of any one of the amino acid sequences given in Table A3 of the Examples section. Most preferably, the hybridising sequence is capable of hybridising to the complement of a nucleic acid as represented by SEQ ID NO: 118 or to a portion thereof.

[0262] Preferably, the hybridising sequence encodes a polypeptide with an amino acid sequence which, when full-length and used in the construction of a phylogenetic tree, such as the one depicted in FIG. 10, clusters with the group of HD-hydrolase-like polypeptides comprising the amino acid sequence represented by SEQ ID NO: 119 rather than with any other group and/or comprises any one or more of the motifs 11 to 26 defined above.

[0263] Another nucleic acid variant useful in the methods of the invention is a splice variant encoding an SGT1 polypeptide, or a CLC-pKG polypeptide, or a HD-hydrolase-like polypeptide, as defined hereinabove, a splice variant being as defined herein.

[0264] According to the present invention, there is provided a method for enhancing yield-related traits in plants, comprising introducing and expressing in a plant a splice variant of any one of the nucleic acid sequences given in Table A1 to A3 of the Examples section, or a splice variant of a nucleic acid encoding an orthologue, paralogue or homologue of any of the amino acid sequences given in Table A1 to A3 of the Examples section.

[0265] Concerning SGT1 polypeptides, preferred splice variants are splice variants of a nucleic acid represented by SEQ ID NO: 1, or a splice variant of a nucleic acid encoding an orthologue or paralogue of SEQ ID NO: 2. Preferably, the amino acid sequence encoded by the splice variant, when used in the construction of a phylogenetic tree, clusters with the group of SGT1 polypeptides comprising the amino acid sequence represented by SEQ ID NO: 2 rather than with any other group.

[0266] Concerning CLC-pKG polypeptides, preferred splice variants are splice variants of a nucleic acid represented by SEQ ID NO: 53, or a splice variant of a nucleic acid encoding an orthologue or paralogue of SEQ ID NO: 54. Preferably, the amino acid sequence encoded by the splice variant, when used in the construction of a phylogenetic tree, such as the one depicted in FIG. 1 of Marmagne et al. 2007 (herein incorporated by reference), clusters with the group of CLC polypeptides of bacterial origin, preferably with SCLC (P74477) from Synechocystis sp.; or with the group of plant origin comprising AtCLCe and AtCLCf than with any other anion group.

[0267] Concerning HD-hydrolase-like polypeptides, preferred splice variants are splice variants of a nucleic acid represented by SEQ ID NO: 118, or a splice variant of a nucleic acid encoding an orthologue or paralogue of SEQ ID NO: 119. Preferably, the amino acid sequence encoded by the splice variant, when used in the construction of a phylogenetic tree, such as the one depicted in FIG. 10, clusters with the group of HD-hydrolase-like polypeptides comprising the amino acid sequence represented by SEQ ID NO: 119 rather than with any other group and/or comprises any one or more of the motifs 11 to 26 defined above.

[0268] Another nucleic acid variant useful in performing the methods of the invention is an allelic variant of a nucleic acid encoding an SGT1 polypeptide, or a CLC-pKG polypeptide, or a HD-hydrolase-like polypeptide, as defined hereinabove, an allelic variant being as defined herein.

[0269] According to the present invention, there is provided a method for enhancing yield-related traits in plants, comprising introducing and expressing in a plant an allelic variant of any one of the nucleic acids given in Table A1 to A3 of the Examples section, or comprising introducing and expressing in a plant an allelic variant of a nucleic acid encoding an orthologue, paralogue or homologue of any of the amino acid sequences given in Table A1 to A3 of the Examples section.

[0270] Concerning SGT1 polypeptides, the polypeptides encoded by allelic variants useful in the methods of the present invention have substantially the same biological activity as the SGT1 polypeptide of SEQ ID NO: 2 and any of the amino acids depicted in Table A1 of the Examples section. Allelic variants exist in nature, and encompassed within the methods of the present invention is the use of these natural alleles. Preferably, the allelic variant is an allelic variant of SEQ ID NO: 1 or an allelic variant of a nucleic acid encoding an orthologue or paralogue of SEQ ID NO: 2. Preferably, the amino acid sequence encoded by the allelic variant, when used in the construction of a phylogenetic tree, clusters with the SGT1 polypeptides comprising the amino acid sequence represented by SEQ ID NO: 2 rather than with any other group.

[0271] Concerning CLC-pKG polypeptides, the polypeptides encoded by allelic variants useful in the methods of the present invention have substantially the same biological activity as the CLC-pKG polypeptide of SEQ ID NO: 54 and any of the amino acids depicted in Table A2 of the Examples section. Allelic variants exist in nature, and encompassed within the methods of the present invention is the use of these natural alleles. Preferably, the allelic variant is an allelic variant of SEQ ID NO: 53 or an allelic variant of a nucleic acid encoding an orthologue or paralogue of SEQ ID NO: 54. Preferably, the amino acid sequence encoded by the allelic variant, when used in the construction of a phylogenetic tree, such as the one depicted in FIG. 1 of Marmagne et al. 2007 (herein incorporated by reference), clusters with the group of CLC polypeptides of bacterial origin, preferably with SCLC (P74477) from Synechocystis sp.; or with the group of plant origin comprising AtCLCe and AtCLCf than with any other anion group.

[0272] Concerning HD-hydrolase-like polypeptides, the polypeptides encoded by allelic variants useful in the methods of the present invention have substantially the same biological activity as the HD-hydrolase-like polypeptide of SEQ ID NO: 119 and any of the amino acids depicted in Table A3 of the Examples section. Allelic variants exist in nature, and encompassed within the methods of the present invention is the use of these natural alleles. Preferably, the allelic variant is an allelic variant of SEQ ID NO: 118 or an allelic variant of a nucleic acid encoding an orthologue or paralogue of SEQ ID NO: 119. Preferably, the amino acid sequence encoded by the allelic variant, when used in the construction of a phylogenetic tree, such as the one depicted in FIG. 10, clusters with the group of HD-hydrolase-like polypeptides comprising the amino acid sequence represented by SEQ ID NO: 119 rather than with any other group and/or comprises any one or more of the motifs 11 to 26 defined above.

[0273] Gene shuffling or directed evolution may also be used to generate variants of nucleic acids encoding SGT1 polypeptides, or CLC-pKG polypeptides, or HD-hydrolase-like polypeptides, as defined above; the term “gene shuffling” being as defined herein.

[0274] According to the present invention, there is provided a method for enhancing yield-related traits in plants, comprising introducing and expressing in a plant a variant of any one of the nucleic acid sequences given in Table A1 to A3 of the Examples section, or comprising introducing and expressing in a plant a variant of a nucleic acid encoding an orthologue, paralogue or homologue of any of the amino acid sequences given in Table A1 to A3 of the Examples section, which variant nucleic acid is obtained by gene shuffling.

[0275] Concerning SGT1 polypeptides, preferably, the amino acid sequence encoded by the variant nucleic acid obtained by gene shuffling, when used in the construction of a phylogenetic tree, clusters with the group of SGT1 polypeptides comprising the amino acid sequence represented by SEQ ID NO: 2 rather than with any other group.

[0276] Concerning CLC-pKG polypeptides, preferably, the amino acid sequence encoded by the variant nucleic acid obtained by gene shuffling, when used in the construction of a phylogenetic tree such as the one depicted in FIG. 1 of Marmagne et al. 2007 (herein incorporated by reference), clusters with the group of CLC polypeptides of bacterial origin, preferably with SCLC (P74477) from Synechocystis sp.; or with the group of plant origin comprising AtCLCe and AtCLCf than with any other anion group.

[0277] Concerning HD-hydrolase-like polypeptides, preferably, the amino acid sequence encoded by the variant nucleic acid obtained by gene shuffling, when used in the construction of a phylogenetic tree, such as the one depicted in FIG. 10, clusters with the group of HD-hydrolase-like polypeptides comprising the amino acid sequence represented by SEQ ID NO: 119 rather than with any other group and/or comprises any one or more of the motifs 11 to 26 defined above.

[0278] Furthermore, nucleic acid variants may also be obtained by site-directed mutagenesis. Several methods are available to achieve site-directed mutagenesis, the most common being PCR based methods (Current Protocols in Molecular Biology. Wiley Eds.).

[0279] Nucleic acids encoding SGT1 polypeptides may be derived from any natural or artificial source. The nucleic acid may be modified from its native form in composition and/or genomic environment through deliberate human manipulation. Preferably the SGT1 polypeptide-encoding nucleic acid is from a plant, further preferably from pepper, most preferably the nucleic acid is from Capsicum annuum.

[0280] Nucleic acids encoding CLC-pKG polypeptides may be derived from any natural or artificial source. The nucleic acid may be modified from its native form in composition and/or genomic environment through deliberate human manipulation. Preferably the CLC-pKG polypeptide-encoding nucleic acid is from a cyanobacterial origin, further preferably from Synechocystis species, most preferably from Synechocystis sp. PCC 6803.

[0281] Nucleic acids encoding HD-hydrolase-like polypeptides may be derived from any natural or artificial source. The nucleic acid may be modified from its native form in composition and/or genomic environment through deliberate human manipulation. Preferably the HD-hydrolase-like polypeptide-encoding nucleic acid is from a plant or a bacterium, further preferably from a cyanophyte, more preferably from the family Chroococcaceae, most preferably the nucleic acid is from Synechocystis sp.

[0282] Performance of the methods of the invention gives plants having enhanced yield-related traits. In particular, performance of the methods of the invention gives plants having increased yield, especially increased seed yield relative to control plants. The terms “yield” and “seed yield” are described in more detail in the “definitions” section herein.

[0283] Reference herein to enhanced yield-related traits is taken to mean an increase early vigour and/or in biomass (weight) of one or more parts of a plant, which may include aboveground (harvestable) parts and/or (harvestable) parts below ground. In particular, such harvestable parts are seeds, and performance of the methods of the invention results in plants having increased seed yield relative to the seed yield of control plants.

[0284] The present invention provides a method for increasing yield-related traits, especially seed yield in plants, relative to control plants, which method comprises modulating expression in a plant of a nucleic acid encoding an SGT1 polypeptide, or a CLC-pKG polypeptide, or a HD-hydrolase-like polypeptide, as defined herein.

[0285] Since the transgenic plants according to the present invention have increased yield and/or increased yield-related traits, it is likely that these plants exhibit an increased growth rate (during at least part of their life cycle), relative to the growth rate of control plants at a corresponding stage in their life cycle.

[0286] According to a preferred feature of the present invention, performance of the methods of the invention gives plants having an increased growth rate relative to control plants. Therefore, according to the present invention, there is provided a method for increasing the growth rate of plants, which method comprises modulating expression in a plant of a nucleic acid encoding an SGT1 polypeptide, or a CLC-pKG polypeptide, or a HD-hydrolase-like polypeptide, as defined herein.

[0287] Performance of the methods of the invention gives plants grown under non-stress conditions or under mild drought conditions increased yield relative to control plants grown under comparable conditions. Therefore, according to the present invention, there is provided a method for increasing yield in plants grown under non-stress conditions or under mild drought conditions, which method comprises modulating expression in a plant of a nucleic acid encoding an SGT1 polypeptide, or a CLC-pKG polypeptide, or a HD-hydrolase-like polypeptide.

[0288] Performance of the methods of the invention gives plants grown under conditions of nutrient deficiency, particularly under conditions of nitrogen deficiency, increased yield relative to control plants grown under comparable conditions. Therefore, according to the present invention, there is provided a method for increasing yield in plants grown under conditions of nutrient deficiency, which method comprises modulating expression in a plant of a nucleic acid encoding an SGT1 polypeptide, or a CLC-pKG polypeptide, or a HD-hydrolase-like polypeptide.

[0289] Performance of the methods of the invention gives plants grown under conditions of salt stress, increased yield relative to control plants grown under comparable conditions. Therefore, according to the present invention, there is provided a method for increasing yield in plants grown under conditions of salt stress, which method comprises modulating expression in a plant of a nucleic acid encoding an SGT1 polypeptide, or a CLC-pKG polypeptide, or a HD-hydrolase-like polypeptide.

[0290] The invention also provides genetic constructs and vectors to facilitate introduction and/or expression in plants of nucleic acids encoding an SGT1 polypeptide, or a CLC-pKG polypeptide, or a HD-hydrolase-like polypeptide. The gene constructs may be inserted into vectors, which may be commercially available, suitable for transforming into plants and suitable for expression of the gene of interest in the transformed cells. The invention also provides use of a gene construct as defined herein in the methods of the invention.

[0291] More specifically, the present invention provides a construct comprising:
[0292] (a) a nucleic acid encoding an SGT1 polypeptide, or a CLC-pKG polypeptide, or a HD-hydrolase-like polypeptide, as defined above;
[0293] (b) one or more control sequences capable of driving expression of the nucleic acid sequence of (a); and optionally
[0294] (c) a transcription termination sequence.

[0295] Preferably, the nucleic acid encoding an SGT1 polypeptide, or a CLC-pKG polypeptide, or a HD-hydrolase-like polypeptide, is as defined above. The term “control sequence” and “termination sequence” are as defined herein.

[0296] Plants are transformed with a vector comprising any of the nucleic acids described above. The skilled artisan is well aware of the genetic elements that must be present on the vector in order to successfully transform, select and propagate host cells containing the sequence of interest. The sequence of interest is operably linked to one or more control sequences (at least to a promoter).

[0297] Concerning SGT1 polypeptides, advantageously, any type of promoter, whether natural or synthetic, may be used to drive expression of the nucleic acid sequence, but preferably the promoter is of plant origin. A root-specific promoter is particularly useful in the methods. The root-specific promoter is preferably an RCc3 promoter (Plant Mol Biol. 1995 January; 27(2):237-48), more preferably the RCc3 promoter is from rice, further preferably the RCc3 promoter is represented by a nucleic acid sequence substantially similar to SEQ ID NO: 50, most preferably the promoter is as represented by SEQ ID NO: 50. Examples of other root-specific promoters which may also be used to perform the methods of the invention are shown in Table 2b in the “Definitions” section above.

[0298] Concerning CLC-pKG polypeptides, advantageously, any type of promoter, whether natural or synthetic, may be used to drive expression of the nucleic acid sequence, but preferably the promoter is of plant origin. A root promoter is particularly useful in the methods. Preferably the root promoter is ubiquitous within the root. Also useful in the methods of the invention is constitutive promoter. Preferably the constitutive promoter is a ubiquitous constitutive promoter of medium strength. See the “Definitions” section herein for definitions of the various promoter types.

[0299] Concerning HD-hydrolase-like polypeptides, advantageously, any type of promoter, whether natural or synthetic, may be used to drive expression of the nucleic acid sequence, but preferably the promoter is of plant origin. A constitutive promoter is particularly useful in the methods. Preferably the constitutive promoter is a ubiquitous constitutive promoter of medium strength. See the “Definitions” section herein for definitions of the various promoter types.

[0300] Concerning SGT1 polypeptides, it should be clear that the applicability of the present invention is not restricted to the SGT1 polypeptide-encoding nucleic acid represented by SEQ ID NO: 1, nor is the applicability of the invention restricted to expression of a SGT1 polypeptide-encoding nucleic acid when driven by a root-specific promoter.

[0301] Optionally, one or more terminator sequences may be used in the construct introduced into a plant. Preferably, the construct comprises an expression cassette comprising an RCc3 promoter, substantially similar to SEQ ID NO: 50, and the nucleic acid encoding an SGT1 polypeptide.

[0302] According to a preferred feature of the invention, the modulated expression is increased expression. Methods for increasing expression of nucleic acids or genes, or gene products, are well documented in the art and examples are provided in the definitions section.

[0303] Concerning CLC-pKG polypeptides, it should be clear that the applicability of the present invention is not restricted to the CLC-pKG polypeptide-encoding nucleic acid represented by SEQ ID NO: 53, nor is the applicability of the invention restricted to expression of a CLC-pKG polypeptide-encoding nucleic acid when driven by root-specific a promoter, or when driven by a constitutive promoter.

[0304] The constitutive promoter is preferably a medium strength promoter, more preferably selected from a plant derived promoter, such as a GOS2 promoter, more preferably is the promoter GOS2 promoter from rice.

[0305] According to another preferred feature of the invention, the nucleic acid encoding a CLC-pKG polypeptide is operably linked to a root-specific promoter. The root-specific promoter is preferably an RCc3 promoter (Plant Mol Biol. 1995 January; 27(2):237-48), more preferably the RCc3 promoter is from rice, further preferably the RCc3 promoter is represented by a nucleic acid sequence substantially similar to SEQ ID NO: 115, most preferably the promoter is as represented by SEQ ID NO: 115. Examples of other root-specific promoters which may also be used to perform the methods of the invention are shown in Table 2b in the “Definitions” section above.

[0306] According to a preferred feature of the invention, the modulated expression is increased expression. Methods for increasing expression of nucleic acids or genes, or gene products, are well documented in the art and examples are provided in the definitions section.

[0307] Concerning HD-hydrolase-like polypeptides, it should be clear that the applicability of the present invention is not restricted to the HD-hydrolase-like polypeptide-encoding nucleic acid represented by SEQ ID NO: 118, nor is the applicability of the invention restricted to expression of a HD-hydrolase-like polypeptide-encoding nucleic acid when driven by a constitutive promoter.

[0308] The constitutive promoter is preferably a medium strength promoter of plant origin, such as a GOS2 promoter, more preferably the promoter is the GOS2 promoter from rice. Further preferably the constitutive promoter is represented by a nucleic acid sequence substantially similar to SEQ ID NO: 164, most preferably the constitutive promoter is as represented by SEQ ID NO: 164. See the “Definitions” section herein for further examples of constitutive promoters.

[0309] Optionally, one or more terminator sequences may be used in the construct introduced into a plant. Preferably, the construct comprises an expression cassette comprising a GOS2 promoter, substantially similar to SEQ ID NO: 164, and the nucleic acid encoding the HD-hydrolase-like polypeptide.

[0310] According to a preferred feature of the invention, the modulated expression is increased expression. Methods for increasing expression of nucleic acids or genes, or gene products, are well documented in the art and examples are provided in the definitions section.

[0311] As mentioned above, a preferred method for modulating expression of a nucleic acid encoding an SGT1 polypeptide, or a CLC-pKG polypeptide, or a HD-hydrolase-like polypeptide, is by introducing and expressing in a plant a nucleic acid encoding an SGT1 polypeptide, or a CLC-pKG polypeptide, or a HD-hydrolase-like polypeptide respectively; however the effects of performing the method, i.e. enhancing yield-related traits may also be achieved using other well known techniques, including but not limited to T-DNA activation tagging, TILLING, homologous recombination. A description of these techniques is provided in the definitions section.

[0312] The invention also provides a method for the production of transgenic plants having enhanced yield-related traits relative to control plants, comprising introduction and expression in a plant of any nucleic acid encoding an SGT1 polypeptide, or a CLC-pKG polypeptide, or a HD-hydrolase-like polypeptide, as defined hereinabove.

[0313] More specifically, the present invention provides a method for the production of transgenic plants having enhanced yield-related traits, particularly increased (seed) yield, which method comprises:
[0314] (i) introducing and expressing in a plant or plant cell nucleic acid encoding an SGT1 polypeptide, or a CLC-pKG polypeptide, or a HD-hydrolase-like polypeptide; and
[0315] (ii) cultivating the plant cell under conditions promoting plant growth and development.

[0316] The nucleic acid of (i) may be any of the nucleic acids capable of encoding an SGT1 polypeptide, or a CLC-pKG polypeptide, or a HD-hydrolase-like polypeptide, as defined herein.

[0317] The nucleic acid may be introduced directly into a plant cell or into the plant itself (including introduction into a tissue, organ or any other part of a plant). According to a preferred feature of the present invention, the nucleic acid is preferably introduced into a plant by transformation. The term “transformation” is described in more detail in the “definitions” section herein.

[0318] The present invention clearly extends to any plant cell or plant produced by any of the methods described herein, and to all plant parts and propagules thereof. The present invention encompasses plants or parts thereof (including seeds) obtainable by the methods according to the present invention. The plants or parts thereof comprise a nucleic acid transgene encoding an SGT1 polypeptide, or a CLC-pKG polypeptide, or a HD-hydrolase-like polypeptide, as defined above. The present invention extends further to encompass the progeny of a primary transformed or transfected cell, tissue, organ or whole plant that has been produced by any of the aforementioned methods, the only requirement being that progeny exhibit the same genotypic and/or phenotypic characteristic(s) as those produced by the parent in the methods according to the invention.

[0319] The invention also includes host cells containing an isolated nucleic acid encoding an SGT1 polypeptide, or a CLC-pKG polypeptide, or a HD-hydrolase-like polypeptide, as defined hereinabove. Preferred host cells according to the invention are plant cells. Host plants for the nucleic acids or the vector used in the method according to the invention, the expression cassette or construct or vector are, in principle, advantageously all plants, which are capable of synthesizing the polypeptides used in the inventive method.

[0320] The methods of the invention are advantageously applicable to any plant. Plants that are particularly useful in the methods of the invention include all plants which belong to the superfamily Viridiplantae, in particular monocotyledonous and dicotyledonous plants including fodder or forage legumes, ornamental plants, food crops, trees or shrubs. According to a preferred embodiment of the present invention, the plant is a crop plant.

[0321] Examples of crop plants include soybean, sunflower, canola, alfalfa, rapeseed, linseed, cotton, tomato, potato and tobacco. Further preferably, the plant is a monocotyledonous plant. Examples of monocotyledonous plants include sugarcane. More preferably the plant is a cereal. Examples of cereals include rice, maize, wheat, barley, millet, rye, triticale, sorghum, emmer, spelt, secale, einkorn, teff, milo and oats.

[0322] The invention also extends to harvestable parts of a plant such as, but not limited to seeds, leaves, fruits, flowers, stems, roots, rhizomes, tubers and bulbs, which harvestable parts comprise a recombinant nucleic acid encoding an SGT1 polypeptide, or a CLC-pKG polypeptide, or a HD-hydrolase-like polypeptide. The invention furthermore relates to products derived, preferably directly derived, from a harvestable part of such a plant, such as dry pellets or powders, oil, fat and fatty acids, starch or proteins.

[0323] The present invention also encompasses use of nucleic acids encoding SGT1 polypeptides, or CLC-pKG polypeptides, or HD-hydrolase-like polypeptides, as described herein and use of these SGT1 polypeptides, or CLC-pKG polypeptides, or HD-hydrolase-like polypeptides, in enhancing any of the aforementioned yield-related traits in plants. For example, nucleic acids encoding an SGT1 polypeptide, or a CLC-pKG polypeptide, or a HD-hydrolase-like polypeptide, described herein, or the SGT1 polypeptides, or CLC-pKG polypeptides, or HD-hydrolase-like polypeptides, themselves, may find use in breeding programmes in which a DNA marker is identified which may be genetically linked to gene encoding an SGT1 polypeptide, or a CLC-pKG polypeptide, or a HD-hydrolase-like polypeptide. The nucleic acids/genes, or the SGT1 polypeptides, or CLC-pKG polypeptides, or HD-hydrolase-like polypeptides, may be used to define a molecular marker. This DNA or protein marker may then be used in breeding programmes to select plants having enhanced yield-related traits as defined hereinabove in the methods of the invention. Furthermore, allelic variants of nucleic acid/gene encoding an SGT1 polypeptide, or a CLC-pKG polypeptide, or a HD-hydrolase-like polypeptide, may find use in marker-assisted breeding programmes. Nucleic acids encoding an SGT1 polypeptide, or a CLC-pKG polypeptide, or a HD-hydrolase-like polypeptide, may also be used as probes for genetically and physically mapping the genes that they are a part of, and as markers for traits linked to those genes. Such information may be useful in plant breeding in order to develop lines with desired phenotypes.

### Items

### 1. SGT1 Polypeptides

[0324] In one aspect, the invention is characterised by any of the following items
[0325] 1. A method for enhancing yield-related traits in plants relative to control plants, comprising modulating expression in a plant of a nucleic acid encoding an SGT1 polypeptide, wherein said SGT1 polypeptide comprises the following in any order:
   [0326] (i) at least one tetratricopeptide (TPR) repeat;
   [0327] (ii) at least one CS domain; and
   [0328] (iii) an SGS domain.
[0329] 2. Method according to item 1, wherein said modulated expression is effected by introducing and expressing in a plant a nucleic acid encoding an SGT1 polypeptide.
[0330] 3. Method according to item 1 or 2, wherein said nucleic acid encoding an SGT1 polypeptide encodes any one of the proteins listed in Table A1 or is a portion of such a nucleic acid, or a nucleic acid capable of hybridising with such a nucleic acid.
[0331] 4. Method according to any one of items 1 to 3, wherein said nucleic acid sequence encodes an orthologue or paralogue of any of the proteins given in Table A1.
[0332] 5. Method according to any preceding item, wherein said enhanced yield-related traits comprise increased seed yield relative to control plants.
[0333] 6. Method according to any one of items 1 to 5, wherein said enhanced yield-related traits are obtained under non-stress conditions.
[0334] 7. Method according to any one of items 2 to 6, wherein said nucleic acid is operably linked to a root-specific promoter, preferably to an RCc3 promoter, most preferably to an RCc3 promoter from rice.
[0335] 8. Method according to any one of items 1 to 7, wherein said nucleic acid encoding a SGT1 polypeptide is of plant origin, preferably from Capsicum annuum a dicotyledonous plant, further preferably from the family Solanaceae, more preferably from the genus Capsicum, most preferably from Capsicum annuum.
[0336] 9. Plant or part thereof, including seeds, obtainable by a method according to any one of items 1 to 8, wherein said plant or part thereof comprises a recombinant nucleic acid encoding an SGT1 polypeptide.
[0337] 10. Construct comprising:
   [0338] (i) nucleic acid encoding an SGT1 polypeptide as defined in item 1;
   [0339] (ii) one or more control sequences capable of driving expression of the nucleic acid sequence of (a); and optionally
   [0340] (iii) a transcription termination sequence.
[0341] 11. Construct according to item 10, wherein one of said control sequences is a root-specific promoter, preferably an RCc3 promoter, most preferably an RCc3 promoter from rice.
[0342] 12. Use of a construct according to item 10 or 11 in a method for making plants having increased yield, particularly increased seed yield relative to control plants.
[0343] 13. Plant, plant part or plant cell transformed with a construct according to item 10 or 11.
[0344] 14. Method for the production of a transgenic plant having increased yield, particularly increased seed yield relative to control plants, comprising:
   [0345] (i) introducing and expressing in a plant a nucleic acid encoding an SGT1 polypeptide as defined in item 1; and
   [0346] (ii) cultivating the plant cell under conditions promoting plant growth and development.
[0347] 15. Transgenic plant having increased yield, particularly increased seed yield, relative to control plants, resulting from modulated expression of a nucleic acid encoding an SGT1 polypeptide as defined in item 1, or a transgenic plant cell derived from said transgenic plant.
[0348] 16. Transgenic plant according to item 9, 13 or 15, or a transgenic plant cell derived thereof, wherein said plant is a crop plant or a monocot or a cereal, such as rice, maize, wheat, barley, millet, rye, triticale, sorghum emmer, spelt, secale, einkorn, teff, milo and oats.
[0349] 17. Harvestable parts of a plant according to item 16, wherein said harvestable parts are preferably shoot biomass and/or seeds.
[0350] 18. Products derived from a plant according to item 16 and/or from harvestable parts of a plant according to item 17.
[0351] 19. Use of a nucleic acid encoding an SGT1 polypeptide in increasing yield, particularly in increasing seed yield relative to control plants.
[0352] 20. Use of a nucleic acid encoding an SGT1 polypeptide as a molecular marker for plants having increased yield, particularly increased seed yield.

### 2. CLC-pKG Polypeptides

[0353] In another aspect, the invention is characterised by any of the following items
[0354] 1. A method for enhancing yield-related traits in plants relative to control plants, comprising modulating expression in a plant of a nucleic acid encoding a CLC-pKG polypeptide, wherein said CLC-pKG polypeptide comprises a Voltage_CLC domain (Pfam entry PF00654) and a CBS domain (Pfam entry PF00571) and optionally a USP domain (PF00582).
[0355] 2. Method according to item 1, wherein said CLC-pKG polypeptide comprises a domain having in increasing order of preference at least 25%, 26%, 27%, 28%, 29%, 30%, 31%, 32%, 33%, 34%, 35%, 36%, 37%, 38%, 39%, 40%, 41%, 42%, 43%, 44%, 45%, 46%, 47%, 48%, 49%, 50%, 51%, 52%, 53%, 54%, 55%, 56%, 57%, 58%, 59%, 60%, 61%, 62%, 63%, 64%, 65%, 66%, 67%, 68%, 69%, 70%, 71%, 72%, 73%, 74%, 75%, 76%, 77%, 78%, 79%, 80%, 81%, 82%, 83%, 84%, 85%, 86%, 87%, 88%, 89%, 90%, 91%, 92%, 93%, 94%, 95%, 96%, 97%, 98%, 99% or 100% sequence identity to:
   [0356] (i) a CLC in SEQ ID NO: 54 as represented by the sequence located between amino acids 77 and 422 of SEQ ID NO: 54;
   [0357] (ii) a CBS domain in SEQ ID NO: 54 as represented by the sequence located between amino acids 455 to 510 or 516 to 571 SEQ ID NO: 54; and optionally
   [0358] (iii) a USP domain in SEQ ID NO: 54 as represented by the sequence located between amino acids 597-731 of SEQ ID NO: 54.
[0359] 3. Method according to item 1 or 2, wherein said modulated expression is effected by introducing and expressing in a plant a genetic construct comprising a nucleic acid encoding a CLC-pKG polypeptide.
[0360] 4. Method according to any one of items 1 to 3, wherein said nucleic acid encoding a CLC-pKG polypeptide encodes any one of the proteins listed in Table A2 or is a portion of such a nucleic acid, or a nucleic acid capable of hybridising with such a nucleic acid.
[0361] 5. Method according to any one of items 1 to 4, wherein said nucleic acid encodes an orthologue or paralogue of any of the proteins given in Table A2.
[0362] 6. Method according to any preceding item, wherein said enhanced yield-related traits comprise increased yield, preferably increased biomass and/or increased seed yield relative to control plants.
[0363] 7. Method according to any one of items 1 to 6, wherein said enhanced yield-related traits are obtained under non-stress conditions or under conditions of drought stress, or salt stress.
[0364] 8. Method according to any one of items 3 to 7, wherein said nucleic acid is operably linked to a constitutive promoter, preferably to a RCc3 promoter, most preferably to a RCc3 promoter from rice.
[0365] 9. Method according to any one of items 1 to 8, wherein said nucleic acid encoding a CLC-pKG polypeptide is of cyanobacterial origin, further preferably from Synechosystis species, more preferably from Synechocystis sp. PCC 6803.
[0366] 10. Plant or part thereof, including seeds, obtainable by a method according to any one of items 1 to 9, wherein said plant or part thereof comprises a recombinant nucleic acid encoding a CLC-pKG polypeptide.
[0367] 11. Construct comprising:
   [0368] (i) nucleic acid encoding a CLC-pKG polypeptide as defined in items 1 or 2;
   [0369] (ii) one or more control sequences capable of driving expression of the nucleic acid sequence of (a); and optionally
   [0370] (iii) a transcription termination sequence.
[0371] 12. Construct according to item 11, wherein one of said control sequences is a constitutive promoter, preferably a RCc3 promoter, most preferably a RCc3 promoter from rice.
[0372] 13. Use of a construct according to item 11 or 12 in a method for making plants having increased yield, particularly increased biomass and/or increased seed yield relative to control plants.
[0373] 14. Plant, plant part or plant cell transformed with a construct according to item 11 or 12.
[0374] 15. Method for the production of a transgenic plant having increased yield, particularly increased biomass and/or increased seed yield relative to control plants, comprising:
   [0375] (i) introducing and expressing in a plant a nucleic acid encoding a CLC-pKG polypeptide as defined in item 1 or 2; and
   [0376] (ii) cultivating the plant cell under conditions promoting plant growth and development.
[0377] 16. Transgenic plant having increased yield, particularly increased biomass and/or increased seed yield, relative to control plants, resulting from modulated expression of a recombinant nucleic acid encoding a CLC-pKG polypeptide as defined in item 1 or 2, or a transgenic plant cell derived from said transgenic plant.
[0378] 17. Transgenic plant according to item 10, 14 or 16, or a transgenic plant cell derived thereof, wherein said plant is a crop plant or a monocot or a cereal, such as rice, maize, wheat, barley, millet, rye, triticale, sorghum emmer, spelt, secale, einkorn, teff, milo and oats.
[0379] 18. Harvestable parts of a plant according to item 17, wherein said harvestable parts are preferably shoot biomass and/or seeds.
[0380] 19. Products derived from a plant according to item 17 and/or from harvestable parts of a plant according to item 18.
[0381] 20. Use of a genetic construct comprising a nucleic acid encoding a CLC-pKG polypeptide in increasing yield, particularly in increasing seed yield and/or shoot biomass in plants, relative to control plants.

### 3. HD-Hydrolase-Like Polypeptides

[0382] In yet another aspect, the invention is characterised by any of the following items
[0383] 1. A method for enhancing yield-related traits in plants relative to control plants, comprising modulating expression in a plant of a nucleic acid encoding a HD-hydrolase-like polypeptide, wherein said HD-hydrolase-like polypeptide comprises a CRISPR-associated protein Crm2 domain.
[0384] 2. Method according to item 1, wherein said HD-hydrolase-like polypeptide comprises one or more of the motifs 11 to 26.
[0385] 3. Method according to item 1 or 2, wherein said modulated expression is effected by introducing and expressing in a plant a nucleic acid encoding a HD-hydrolase-like polypeptide.
[0386] 4. Method according to any one of items 1 to 3, wherein said nucleic acid encoding a HD-hydrolase-like polypeptide encodes any one of the proteins listed in Table A3 or is a portion of such a nucleic acid, or a nucleic acid capable of hybridising with such a nucleic acid.
[0387] 5. Method according to any one of items 1 to 4, wherein said nucleic acid sequence encodes an orthologue or paralogue of any of the proteins given in Table A3.
[0388] 6. Method according to any preceding item, wherein said enhanced yield-related traits comprise increased yield, preferably increased biomass and/or increased seed yield relative to control plants.
[0389] 7. Method according to any one of items 1 to 6, wherein said enhanced yield-related traits are obtained under non-stress conditions.
[0390] 8. Method according to any one of items 3 to 7, wherein said nucleic acid is operably linked to a constitutive promoter, preferably to a GOS2 promoter, most preferably to a GOS2 promoter from rice.
[0391] 9. Method according to any one of items 1 to 8, wherein said nucleic acid encoding a HD-hydrolase-like polypeptide is of plant origin, preferably from a cyanophyte, further preferably from the family Chroococcaceae, more preferably from the genus Synechocystis.
[0392] 10. Plant or part thereof, including seeds, obtainable by a method according to any one of items 1 to 9, wherein said plant or part thereof comprises a recombinant nucleic acid encoding a HD-hydrolase-like polypeptide.
[0393] 11. Construct comprising:
   [0394] (i) nucleic acid encoding a HD-hydrolase-like polypeptide as defined in items 1 or 2;
   [0395] (ii) one or more control sequences capable of driving expression of the nucleic acid sequence of (a); and optionally
   [0396] (iii) a transcription termination sequence.
[0397] 12. Construct according to item 11, wherein one of said control sequences is a constitutive promoter, preferably a GOS2 promoter, most preferably a GOS2 promoter from rice.
[0398] 13. Use of a construct according to item 11 or 12 in a method for making plants having increased yield, particularly increased biomass and/or increased seed yield relative to control plants.
[0399] 14. Plant, plant part or plant cell transformed with a construct according to item 11 or 12.
[0400] 15. Method for the production of a transgenic plant having increased yield, particularly increased biomass and/or increased seed yield relative to control plants, comprising:
   [0401] (i) introducing and expressing in a plant a nucleic acid encoding a HD-hydrolase-like polypeptide as defined in item 1 or 2; and
   [0402] (ii) cultivating the plant cell under conditions promoting plant growth and development.
[0403] 16. Transgenic plant having increased yield, particularly increased biomass and/or increased seed yield, relative to control plants, resulting from modulated expression of a nucleic acid encoding a HD-hydrolase-like polypeptide as defined in item 1 or 2, or a transgenic plant cell derived from said transgenic plant.
[0404] 17. Transgenic plant according to item 10, 14 or 16, or a transgenic plant cell derived thereof, wherein said plant is a crop plant or a monocot or a cereal, such as rice, maize, wheat, barley, millet, rye, triticale, sorghum emmer, spelt, secale, einkorn, teff, milo and oats.
[0405] 18. Harvestable parts of a plant according to item 17, wherein said harvestable parts are preferably shoot biomass and/or seeds.
[0406] 19. Products derived from a plant according to item 17 and/or from harvestable parts of a plant according to item 18.
[0407] 20. Use of a nucleic acid encoding a HD-hydrolase-like polypeptide in increasing yield, particularly in increasing seed yield and/or shoot biomass in plants, relative to control plants.

### DESCRIPTION OF FIGURES

[0408] The present invention will now be described with reference to the following figures in which:

[0409] FIG. 1 represents a multiple alignment of various SGT1 polypeptides. Alignment of polypeptide sequences was performed using the ClustalW 2.0 algorithm of progressive alignment (Thompson et al. (1997) Nucleic Acids Res 25:4876-4882; Chema et al. (2003). Nucleic Acids Res 31:3497-3500) with standard setting (slow alignment, similarity matrix: Gonnet, gap opening penalty 10, gap extension penalty: 0.2). Minor manual editing was done to further optimise the alignment. The SGT1 polypeptides are aligned in FIG. 2.

[0410] FIG. 2 shows a further alignment highlighting the conserved domains common to SGT1 polypeptides.

[0411] FIG. 3 shows a phylogenetic tree of SGT1 polypeptides constructed using a neighbour-joining clustering algorithm as provided in the AlignX programme from the Vector NTI (Invitrogen).

[0412] FIG. 4 represents the binary vector used for increased expression in Oryza sativa of an SGT1-encoding nucleic acid under the control of a rice RCc3 promoter (pRCc3).

[0413] FIG. 5 represents a multiple alignment of various CLC-pKG polypeptides. The asterisks indicate identical amino acids among the various protein sequences, colons represent highly conserved amino acid substitutions, and the dots represent less conserved amino acid substitution; on other positions there is no sequence conservation. These alignments can be used for defining further motifs, when using conserved amino acids.

[0414] FIG. 6 shows phylogenetic tree of CLC-pKG polypeptides.

[0415] FIG. 7 represents the binary vector used for increased expression in Oryza sativa of a CLC-PKG-encoding nucleic acid under the control of a rice RCc3 promoter (pRCc3).

[0416] FIG. 8 represents the domain structure of SEQ ID NO: 119 with conserved motifs 11 to 26, underlined and numbered. The CRISPR-associated protein Crm2 (IPRO13407) domain is shown in bold.

[0417] FIG. 9 represents a multiple alignment of various HD-hydrolase-like polypeptides. The asterisks indicate identical amino acids among the various protein sequences, colons represent highly conserved amino acid substitutions, and the dots represent less conserved amino acid substitution; on other positions there is no sequence conservation. These alignments can be used for defining further motifs, when using conserved amino acids.

[0418] FIG. 10 shows phylogenetic tree of HD-hydrolase-like polypeptides. The identifiers are the accession numbers as provided for the proteins in the sequence listing.

[0419] FIG. 11 represents the binary vector used for increased expression in Oryza sativa of a HD-hydrolase-like-encoding nucleic acid under the control of a rice GOS2 promoter (pGOS2).

### EXAMPLES

[0420] The present invention will now be described with reference to the following examples, which are by way of illustration alone. The following examples are not intended to completely define or otherwise limit the scope of the invention.

[0421] DNA manipulation: unless otherwise stated, recombinant DNA techniques are performed according to standard protocols described in (Sambrook (2001) Molecular Cloning: a laboratory manual, 3rd Edition Cold Spring Harbor Laboratory Press, CSH, New York) or in Volumes 1 and 2 of Ausubel et al. (1994), Current Protocols in Molecular Biology, Current Protocols. Standard materials and methods for plant molecular work are described in Plant Molecular Biology Labfax (1993) by R. D. D. Croy, published by BIOS Scientific Publications Ltd (UK) and Blackwell Scientific Publications (UK).

### Example 1

### Identification of Sequences Related to the Nucleic Acid Sequence Used in the Methods of the Invention

### 1. SGT1 Polypeptides

[0422] Sequences (full length cDNA, ESTs or genomic) related to SEQ ID NO: 1 and SEQ ID NO: 2 were identified amongst those maintained in the Entrez Nucleotides database at the National Center for Biotechnology Information (NCBI) using database sequence search tools, such as the Basic Local Alignment Tool (BLAST) (Altschul et al. (1990) J. Mol. Biol. 215:403-410; and Altschul et al. (1997) Nucleic Acids Res. 25:3389-3402). The program is used to find regions of local similarity between sequences by comparing nucleic acid or polypeptide sequences to sequence databases and by calculating the statistical significance of matches. For example, the polypeptide encoded by the nucleic acid of SEQ ID NO: 1 was used for the TBLASTN algorithm, with default settings and the filter to ignore low complexity sequences set off. The output of the analysis was viewed by pairwise comparison, and ranked according to the probability score (E-value), where the score reflect the probability that a particular alignment occurs by chance (the lower the E-value, the more significant the hit). In addition to E-values, comparisons were also scored by percentage identity. Percentage identity refers to the number of identical nucleotides (or amino acids) between the two compared nucleic acid (or polypeptide) sequences over a particular length. In some instances, the default parameters may be adjusted to modify the stringency of the search. For example the E-value may be increased to show less stringent matches. This way, short nearly exact matches may be identified.

[0423] Table A1 provides a list of nucleic acid sequences related to SEQ ID NO: 1 and SEQ ID NO: 2.

TABLE A1
Examples of SGT1 nucleic acids and polypeptides

| | Nucleic | Poly- |
|---|---|---|
| | acid | peptide |
| Name | SEQ | SEQ |
| | ID NO: | ID NO: |
| SGT1 from Pepper | 1 | 2 |
| A.thaliana_AT4G23570.1#1 | 3 | 4 |
| A.thaliana_AT4G23570.2#1 | 5 | 6 |
| A.thaliana_AT4G11260.1#1 | 7 | 8 |
| A.thaliana_AT4G23570.3#1 | 9 | 10 |
| B.napus_BN06MC26625_51284379@26524#1 | 11 | 12 |
| G.max_GM06MC38560_sab91h08@37598#1 | 13 | 14 |
| H.vulgare_c62589592hv270303@6491#1 | 15 | 16 |
| M.truncatula_CT025844_7.4#1 | 17 | 18 |
| O.sativa_LOC_Os01g43540.1#1 | 19 | 20 |
| P.trichocarpa_scaff_IV.839#1 | 21 | 22 |
| P.trichocarpa_scaff_44.273#1 | 23 | 24 |
| S.lycopersicum_TC192025#1 | 25 | 26 |
| S.lycopersicum_NP9243669#1 | 27 | 28 |
| S.lycopersicum_AW398985#1 | 29 | 30 |
| T.aestivum_TC280790#1 | 31 | 32 |
| Z.mays_ZM07MC27211_BFb0187N13@27130#1 | 33 | 34 |
| Z.mays_ZM07MC23831_BFb0038K08@23765#1 | 35 | 36 |

[0424] Sequences have been tentatively assembled and publicly disclosed by research institutions, such as The Institute for Genomic Research (TIGR; beginning with TA). The Eukaryotic Gene Orthologs (EGO) database may be used to identify such related sequences, either by keyword search or by using the BLAST algorithm with the nucleic acid sequence or polypeptide sequence of interest. Special nucleic acid sequence databases have been created for particular organisms, such as by the Joint Genome Institute.

### 2. CLC-pKG Polypeptides

[0425] Sequences (full length cDNA, ESTs or genomic) related to SEQ ID NO: 53 and SEQ ID NO: 54 were identified amongst those maintained in the Entrez Nucleotides database at the National Center for Biotechnology Information (NCBI) using database sequence search tools, such as the Basic Local Alignment Tool (BLAST) (Altschul et al. (1990) J. Mol. Biol. 215:403-410; and Altschul et al. (1997) Nucleic Acids Res. 25:3389-3402). The program is used to find regions of local similarity between sequences by comparing nucleic acid or polypeptide sequences to sequence databases and by calculating the statistical significance of matches. For example, the polypeptide encoded by the nucleic acid of SEQ ID NO: 53 was used for the TBLASTN algorithm, with default settings and the filter to ignore low complexity sequences set off. The output of the analysis was viewed by pairwise comparison, and ranked according to the probability score (E-value), where the score reflect the probability that a particular alignment occurs by chance (the lower the E-value, the more significant the hit). In addition to E-values, comparisons were also scored by percentage identity. Percentage identity refers to the number of identical nucleotides (or amino acids) between the two compared nucleic acid (or polypeptide) sequences over a particular length. In some instances, the default parameters may be adjusted to modify the stringency of the search. For example the E-value may be increased to show less stringent matches. This way, short nearly exact matches may be identified.

[0426] Table A2 provides a list of nucleic acid sequences and polypeptides related to SEQ ID NO: 53 and SEQ ID NO: 54.

TABLE A2
Examples of CLC-pKG polypeptides

| | | Nucleic acid |
|---|---|---|
| Organism | Nucleic acid name | SEQ ID NO |
| Synechocystis sp. PCC 6803] | gi\|16329170: 2216476-2219175 | 53 |
| Cyanothece sp. PCC 7424] | gi\|218437013: 4004295-4006922 | 55 |
| Cyanothece sp. PCC 7822] | gi\|196258358: 38011-40635 | 57 |
| Cyanothece sp. CCY0110] | gi\|126659182: 36041-38674 | 59 |
| Cyanothece sp. ATCC 51142] | gi\|172034917: 71619-74267 | 61 |
| Cyanothece sp. PCC 8801] | gi\|218244892: 3580780-3583419 | 63 |
| Crocosphaera watsonii WH 8501] | gi\|67923302: 15782-18430 | 65 |
| Microcystis aeruginosa PCC 7806] | gi\|159026870: 19707-22334 | 67 |
| Microcystis aeruginosa NIES-843] | gi\|166362741: 3545508-3548135 | 69 |
| Synechococcus sp. PCC 7002] | gi\|170076636: 589624-592260 | 71 |
| Nodularia spumigena CCY9414] | gi\|119510275: 28473-31136 | 73 |
| Microcoleus chthonoplastes PCC 7420] | gi1254413420: 221158-223773 | 75 |
| Nostoc punctiforme PCC 73102] | gi\|186680550: 3804594-3807185 | 77 |
| Nostoc punctiforme PCC 73102] | gi\|186680550: 2232857-2235448 | 79 |
| Anabaena variabilis ATCC 29413] | gi\|75906225: 2674416-2677004 | 81 |
| Nostoc sp. PCC 7120] | gi\|17227497: 5827615-5830230 | 83 |
| ‘Nostoc azollae’ 0708] | gi\|225522173: 3082-5673 | 85 |
| Nostoc punctiforme PCC 73102] | gi\|186680550: 2232857-2235448 | 87 |
| Anabaena variabilis ATCC 29413] | gi\|75906225: 2674416-2677004 | 89 |
| Nostoc sp. PCC 7120] | gi\|17227497: 5827615-5830230 | 91 |
| ‘Nostoc azollae’ 0708] | gi\|225522173: 3082-5673 | 93 |
| Nostoc punctiforme PCC 73102] | gi\|186680550: 1989068-1991719 | 95 |
| ‘Nostoc azollae’ 0708] | gi\|225516157: 49369-51948 | 97 |
| Lyngbya sp. PCC 8106] | gi\|119486739: 136813-139515 | 99 |
| Cyanothece sp. PCC 7425] | gi\|220905643: 4270175-4272766 | 101 |
| Gloeobacter violaceus PCC 7421] | gi\|37519569: 4380220-4382796 | 103 |
| Arthrospira maxima CS-328] | gi\|209525652: 71572-74244 | 105 |
| Acaryochloris marina MBIC11017] | gi\|158333233: 913406-916021 | 107 |
| Cyanothece sp. PCC 7425] | gi\|220905643: 2873784-2876477 | 109 |
| Synechococcus elongatus PCC 7942] | gi\|81298811: 1653255-1655834 | 111 |
| | | Polypeptide |
| Organism | Polypeptide name | SEQ ID NO |
| Synechocystis sp. PCC 6803] | gi\|16331172\|ref\|NP_441900 | 54 |
| Cyanothece sp. PCC 7424] | gi\|218440518\|ref\|YP_002378847 | 56 |
| Cyanothece sp. PCC 7822] | gi\|196258397\|ref\|ZP_03156931 | 58 |
| Cyanothece sp. CCY0110] | gi\|126659209\|ref\|ZP_01730347 | 60 |
| Cyanothece sp. ATCC 51142] | gi\|172034995\|ref\|YP_001801496 | 62 |
| Cyanothece sp. PCC 8801] | gi\|218248189\|ref\|YP_002373560 | 64 |
| Crocosphaera watsonii WH 8501] | gi\|67923321\|ref\|ZP_00516804 | 66 |
| Microcystis aeruginosa PCC 7806] | gi\|159026894\|ref\|CAO89145 | 68 |
| Microcystis aeruginosa NIES-843] | gi\|166366612\|ref\|YP_001658885 | 70 |
| Synechococcus sp. PCC 7002] | gi\|170077188\|ref\|YP_001733826 | 72 |
| Nodularia spumigena CCY9414] | gi\|119510301\|ref\|ZP_01629437 | 74 |
| Microcoleus chthonoplastes PCC 7420] | gi\|254413597\|ref\|ZP_05027367 | 76 |
| Nostoc punctiforme PCC 73102] | gi\|186683293\|ref\|YP_001866489 | 78 |
| Nostoc punctiforme PCC 73102] | gi\|186682226\|ref\|YP_001865422 | 80 |
| Anabaena variabilis ATCC 29413] | gi\|75908381\|ref\|YP_322677 | 82 |
| Nostoc sp. PCC 7120] | gi\|7232383\|ref\|NP_488931 | 84 |
| ‘Nostoc azollae’ 0708] | gi\|225522175\|ref\|ZP_03768989 | 86 |
| Nostoc punctiforme PCC 73102] | gi\|186682226\|ref\|YP_001865422 | 88 |
| Anabaena variabilis ATCC 29413] | gi\|75908381\|ref\|YP_322677 | 90 |
| Nostoc sp. PCC 7120] | gi\|17232383\|ref\|NP_488931 | 92 |
| ‘Nostoc azollae’ 0708] | gi\|225522175\|ref\|ZP_03768989 | 94 |
| Nostoc punctiforme PCC 73102] | gi\|186682049\|ref\|YP_001865245 | 96 |
| ‘Nostoc azollae’ 0708] | gi\|225516217\|ref\|ZP_03763190 | 98 |
| Lyngbya sp. PCC 8106] | gi\|119486852\|ref\|ZP_01620827 | 100 |
| Cyanothece sp. PCC 7425] | gi\|220909579\|ref\|YP_002484890 | 102 |
| Gloeobacter violaceus PCC 7421] | gi\|37523751\|ref\|NP_927128 | 104 |
| Arthrospira maxima CS-328] | gi\|209525724\|ref\|ZP_03274261 | 106 |
| Acaryochloris marina MBIC11017] | gi\|158334130\|ref\|YP_001515302 | 108 |
| Cyanothece sp. PCC 7425] | gi\|220908306\|ref\|YP_002483617 | 110 |
| Synechococcus elongatus PCC 7942] | gi\|181300397\|ref\|YP_400605 | 112 |

[0427] Sequences have been tentatively assembled and publicly disclosed by research institutions, such as The Institute for Genomic Research (TIGR; beginning with TA). The Eukaryotic Gene Orthologs (EGO) database may be used to identify such related sequences, either by keyword search or by using the BLAST algorithm with the nucleic acid sequence or polypeptide sequence of interest. Special nucleic acid sequence databases have been created for particular organisms, such as by the Joint Genome Institute. Furthermore, access to proprietary databases, has allowed the identification of novel nucleic acid and polypeptide sequences.

### 3. HD-Hydrolase-Like Polypeptides

[0428] Sequences (full length cDNA, ESTs or genomic) related to SEQ ID NO: 118 and SEQ ID NO: 119 were identified amongst those maintained in the Entrez Nucleotides database at the National Center for Biotechnology Information (NCBI) using database sequence search tools, such as the Basic Local Alignment Tool (BLAST) (Altschul et al. (1990) J. Mol. Biol. 215:403-410; and Altschul et al. (1997) Nucleic Acids Res. 25:3389-3402). The program is used to find regions of local similarity between sequences by comparing nucleic acid or polypeptide sequences to sequence databases and by calculating the statistical significance of matches. For example, the polypeptide encoded by the nucleic acid of SEQ ID NO: 118 was used for the TBLASTN algorithm, with default settings and the filter to ignore low complexity sequences set off. The output of the analysis was viewed by pairwise comparison, and ranked according to the probability score (E-value), where the score reflect the probability that a particular alignment occurs by chance (the lower the E-value, the more significant the hit). In addition to E-values, comparisons were also scored by percentage identity. Percentage identity refers to the number of identical nucleotides (or amino acids) between the two compared nucleic acid (or polypeptide) sequences over a particular length. In some instances, the default parameters may be adjusted to modify the stringency of the search. For example the E-value may be increased to show less stringent matches. This way, short nearly exact matches may be identified.

[0429] Table A3 provides a list of nucleic acid sequences related to SEQ ID NO: 118 and SEQ ID NO: 119.

TABLE A3
Examples of HD-hydrolase-like nucleic acids and polypeptides

| | | Nucleic acid | Polypeptide |
|---|---|---|---|
| Name | Source | SEQ ID NO: | SEQ ID NO: |
| NP_942378.1 | Synechocystis sp. | 118 | 119 |
| YP_001736234.1 | Synechococcus sp. | 120 | 121 |
| YP_477086.1 | Synechococcus sp. | 122 | 123 |
| ZP_01732553.1 | Cyanothece sp. | 124 | 125 |
| YP_001801768.1 | Cyanothece sp. | 126 | 127 |
| YP_475929.1 | Synechococcus sp. | 128 | 129 |
| ZP_03274910.1 | Arthrospira maxima | 130 | 131 |
| YP_001002214.1 | Halorhodospira | 132 | 133 |
| | halophila | | |
| ZP_05334193.1 | Thermoanaerobacter | 134 | 135 |
| | italicus | | |
| ZP_05378933.1 | Thermoanaerobacter | 136 | 137 |
| | mathranii | | |
| | subsp. Mathranii | | |
| NP_624155.1 | Thermoanaerobacter | 138 | 139 |
| | tengcongensis | | |
| ZP_05091540.1 | Carboxydibrachium | 140 | 141 |
| | pacificum | | |
| YP_001616323.1 | Sorangium cellulosum | 142 | 143 |
| ZP_05335917.1 | Thermoanaerobacterium | 144 | 145 |
| | thermosaccharolyticum | | |
| ZP_01125571.1 | Nitrococcus mobilis | 146 | 147 |

[0430] Sequences have been tentatively assembled and publicly disclosed by research institutions, such as The Institute for Genomic Research (TIGR; beginning with TA). The Eukaryotic Gene Orthologs (EGO) database may be used to identify such related sequences, either by keyword search or by using the BLAST algorithm with the nucleic acid sequence or polypeptide sequence of interest. Special nucleic acid sequence databases have been created for particular organisms, such as by the Joint Genome Institute. Furthermore, access to proprietary databases, has allowed the identification of novel nucleic acid and polypeptide sequences.

### Example 2

### Alignment of Sequences Related to the Polypeptide Sequences Used in the Methods of the Invention

### 1. SGT1 Polypeptides

[0431] Alignment of polypeptide sequences was performed using the ClustalW 2.0 algorithm of progressive alignment (Thompson et al. (1997) Nucleic Acids Res 25:4876-4882; Chenna et al. (2003). Nucleic Acids Res 31:3497-3500) with standard setting (slow alignment, similarity matrix: Gonnet, gap opening penalty 10, gap extension penalty: 0.2). Minor manual editing was done to further optimise the alignment. The SGT1 polypeptides are aligned in FIGS. 1 and 2.

[0432] A phylogenetic tree of SGT1 polypeptides (FIG. 3) was constructed using a neighbour-joining clustering algorithm as provided in the AlignX programme from the Vector NTI (Invitrogen).

### 2. CLC-pKG Polypeptides

[0433] Alignment of polypeptide sequences was performed using the ClustalW 1.8 algorithm of progressive alignment (Thompson et al. (1997) Nucleic Acids Res 25:4876-4882; Chenna et al. (2003). Nucleic Acids Res 31:3497-3500) with standard setting (slow alignment, similarity matrix: Blosum 62, gap opening penalty 10, gap extension penalty: 0.2). Minor manual editing was done to further optimise the alignment. The CLC-pKG polypeptides are aligned in FIG. 5.

[0434] A phylogenetic tree of CLC-pKG polypeptides (FIG. 6) was taken from Marmagne et al. 2007.

### 3. HD-Hydrolase-Like Polypeptides

[0435] Alignment of polypeptide sequences was performed using the ClustalW 1.81 algorithm of progressive alignment (Thompson et al. (1997) Nucleic Acids Res 25:4876-4882; Chenna et al. (2003). Nucleic Acids Res 31:3497-3500) with standard setting (slow alignment, similarity matrix: Gonnet, gap opening penalty 10, gap extension penalty: 0.2). Minor manual editing was done to further optimise the alignment.

[0436] A phylogenetic tree of HD-hydrolase-like polypeptides (FIG. 10) was constructed using a neighbour-joining clustering algorithm as provided in the AlignX program of Vector NTI (Invitrogen).

### Example 3

### Calculation of Global Percentage Identity Between Polypeptide Sequences Useful in Performing the Methods of the Invention

### 1. SGT1 Polypeptides

[0437] Global percentages of similarity and identity between full length polypeptide sequences useful in performing the methods of the invention were determined using one of the methods available in the art, the MatGAT (Matrix Global Alignment Tool) software (BMC Bioinformatics. 2003 4:29. MatGAT: an application that generates similarity/identity matrices using protein or DNA sequences. Campanella J J, Bitincka L, Smalley J; software hosted by Ledion Bitincka). MatGAT software generates similarity/identity matrices for DNA or protein sequences without needing pre-alignment of the data. The program performs a series of pair-wise alignments using the Myers and Miller global alignment algorithm (with a gap opening penalty of 12, and a gap extension penalty of 2), calculates similarity and identity using for example Blosum 62 (for polypeptides), and then places the results in a distance matrix.

[0438] Parameters used in the comparison are: Scoring matrix: Blosum62, First Gap: 12, Extending Gap: 2.

[0439] A MATGAT table for local alignment of a specific domain, or data on % identity/similarity between specific domains may also be performed.

### 2. CLC-pKG Polypeptides

[0440] Global percentages of similarity and identity between full length polypeptide sequences useful in performing the methods of the invention were determined using one of the methods available in the art, the MatGAT (Matrix Global Alignment Tool) software (BMC Bioinformatics. 2003 4:29. MatGAT: an application that generates similarity/identity matrices using protein or DNA sequences. Campanella J J, Bitincka L, Smalley J; software hosted by Ledion Bitincka). MatGAT software generates similarity/identity matrices for DNA or protein sequences without needing pre-alignment of the data. The program performs a series of pair-wise alignments using the Myers and Miller global alignment algorithm (with a gap opening penalty of 12, and a gap extension penalty of 2), calculates similarity and identity using for example Blosum 62 (for polypeptides), and then places the results in a distance matrix. Parameters typically used in the comparisons are: Scoring matrix: Blosum62, First Gap: 12, Extending Gap: 2.

### 3. HD-Hydrolase-Like Polypeptides

[0441] Global percentages of similarity and identity between full length polypeptide sequences useful in performing the methods of the invention were determined using one of the methods available in the art, the MatGAT (Matrix Global Alignment Tool) software (BMC Bioinformatics. 2003 4:29. MatGAT: an application that generates similarity/identity matrices using protein or DNA sequences. Campanella J J, Bitincka L, Smalley J; software hosted by Ledion Bitincka). MatGAT software generates similarity/identity matrices for DNA or protein sequences without needing pre-alignment of the data. The program performs a series of pair-wise alignments using the Myers and Miller global alignment algorithm (with a gap opening penalty of 12, and a gap extension penalty of 2), calculates similarity and identity using for example Blosum 62 (for polypeptides), and then places the results in a distance matrix. Sequence similarity is shown in the bottom half of the dividing line and sequence identity is shown in the top half of the diagonal dividing line.

[0442] Parameters used in the comparison were: Scoring matrix: Blosum62, First Gap: 12, Extending Gap: 2.

[0443] Results of the software analysis are shown in Table B1 for the global similarity and identity over the full length of the polypeptide sequences. The sequence identity (in %) between the HD-hydrolase-like polypeptide sequences useful in performing the methods of the invention can be as low as 17% compared to SEQ ID NO: 118 (NP_{—}942378.1).

TABLE B1
MatGAT results for global similarity and identity over the full length of the polypeptide sequences.

| | 1 | 2 | 3 | 4 | 5 | 6 | 7 | 8 | 9 | 10 | 11 | 12 | 13 | 14 | 15 |
|---|---|---|---|---|---|---|---|---|---|---|---|---|---|---|---|
| 1. NP_942378.1 | | 68.1 | 48.3 | 51.5 | 47.2 | 48.3 | 27.2 | 19.6 | 23.6 | 23.5 | 21.5 | 21.5 | 17.2 | 20.5 | 20.4 |
| 2. YP_001736234.1 | 80.1 | | 46.4 | 50.7 | 46.7 | 49.3 | 27.9 | 19.7 | 25.5 | 24.5 | 21.0 | 20.9 | 19.9 | 22.6 | 22.8 |
| 3. ZP_01732553.1 | 61.8 | 61.0 | | 44.7 | 45.5 | 44.0 | 25.7 | 15.4 | 19.4 | 18.9 | 21.2 | 21.3 | 22.2 | 19.0 | 18.9 |
| 4. YP_477086.1 | 66.7 | 66.2 | 59.3 | | 78.1 | 47.5 | 28.2 | 21.2 | 26.0 | 24.0 | 21.2 | 21.2 | 18.1 | 21.5 | 21.0 |
| 5. YP_475929.1 | 62.6 | 60.9 | 61.2 | 83.8 | | 44.2 | 27.9 | 20.8 | 24.3 | 23.6 | 20.1 | 20.0 | 17.5 | 20.6 | 20.3 |
| 6. YP_001801768.1 | 63.5 | 64.4 | 58.2 | 65.1 | 59.6 | | 26.7 | 19.5 | 23.4 | 22.4 | 22.9 | 21.9 | 18.7 | 20.9 | 20.4 |
| 7. ZP_03274910.1 | 44.6 | 46.3 | 40.4 | 47.1 | 44.8 | 47.9 | | 18.7 | 21.8 | 19.9 | 19.3 | 19.4 | 17.7 | 20.5 | 20.1 |
| 8. YP_001616323.1 | 33.7 | 34.1 | 28.4 | 34.3 | 32.7 | 35.1 | 33.9 | | 24.1 | 23.4 | 18.3 | 18.3 | 15.4 | 20.1 | 20.2 |
| 9. YP_001002214.1 | 42.2 | 41.8 | 36.0 | 41.7 | 39.4 | 40.3 | 37.5 | 34.6 | | 56.1 | 25.4 | 25.5 | 20.2 | 26.3 | 26.6 |
| 10. ZP_01125571.1 | 38.8 | 40.5 | 35.4 | 40.8 | 40.3 | 39.1 | 36.2 | 35.9 | 66.8 | | 24.9 | 24.8 | 19.6 | 26.7 | 27.2 |
| 11. ZP_05334193.1 | 39.4 | 39.8 | 39.8 | 41.2 | 40.4 | 41.4 | 35.6 | 34.3 | 42.9 | 45.5 | | 99.4 | 29.2 | 26.3 | 26.7 |
| 12. ZP_05378933.1 | 39.1 | 39.7 | 40.4 | 40.9 | 40.5 | 41.8 | 35.6 | 34.2 | 43.0 | 45.6 | 99.8 | | 29.3 | 26.4 | 26.7 |
| 13. ZP_05335917.1 | 33.8 | 36.4 | 38.7 | 35.5 | 35.3 | 35.2 | 32.5 | 28.8 | 35.1 | 37.6 | 47.8 | 47.8 | | 22.3 | 22.6 |
| 14. NP_624155.1 | 40.2 | 40.3 | 37.2 | 41.1 | 41.4 | 39.4 | 37.8 | 33.5 | 43.3 | 44.6 | 48.4 | 48.4 | 40.6 | | 97.6 |
| 15. ZP_05091540.1 | 40.2 | 40.8 | 36.9 | 40.1 | 41.1 | 39.3 | 37.6 | 33.5 | 43.5 | 44.4 | 49.1 | 49.4 | 40.4 | 98.6 | |

### Example 4

### Identification of Domains Comprised in Polypeptide Sequences Useful in Performing the Methods of the Invention

### 1. SGT1 Polypeptides

[0444] The Integrated Resource of Protein Families, Domains and Sites (InterPro) database is an integrated interface for the commonly used signature databases for text- and sequence-based searches. The InterPro database combines these databases, which use different methodologies and varying degrees of biological information about well-characterized proteins to derive protein signatures. Collaborating databases include SWISS-PROT, PROSITE, TrEMBL, PRINTS, Propom and Pfam, Smart and TIGRFAMs. Pfam is a large collection of multiple sequence alignments and hidden Markov models covering many common protein domains and families. Pfam is hosted at the Sanger Institute server in the United Kingdom. Interpro is hosted at the European Bioinformatics Institute in the United Kingdom.

[0445] The results of the InterPro scan of the polypeptide sequence as represented by SEQ ID NO: 2 are presented in Table C1.

### 2. CLC-pKG Polypeptides

[0446] The Integrated Resource of Protein Families, Domains and Sites (InterPro) database is an integrated interface for the commonly used signature databases for text- and sequence-based searches. The InterPro database combines these databases, which use different methodologies and varying degrees of biological information about well-characterized proteins to derive protein signatures. Collaborating databases include SWISS-PROT, PROSITE, TrEMBL, PRINTS, Propom and Pfam, Smart and TIGRFAMs. Pfam is a large collection of multiple sequence alignments and hidden Markov models covering many common protein domains and families. Pfam is hosted at the Sanger Institute server in the United Kingdom. Interpro is hosted at the European Bioinformatics Institute in the United Kingdom.

[0447] The results of the pfam scan of the polypeptide sequence as represented by SEQ ID NO: 54 are presented in Table C2.

TABLE C2
pfam scan results (major accession numbers) of the polypeptide sequence as
represented by SEQ ID NO: 54.

| | | | Amino acid |
|---|---|---|---|
| | Accession | | coordinates |
| Database | number | Accession name | on SEQ ID NO 54 |
| Pfam | PF00571 | Voltage Gate Chloride Channel | 77-422 |
| Pfam | PF00571 | CBS domain | 455-510 |
| Pfam | PF00571 | CBS domain | 516-571 |
| Pfam | PF00582 | Universal Stress Protein Family | 597-731 |

### 3. HD-Hydrolase-Like Polypeptides

[0448] The Integrated Resource of Protein Families, Domains and Sites (InterPro) database is an integrated interface for the commonly used signature databases for text- and sequence-based searches. The InterPro database combines these databases, which use different methodologies and varying degrees of biological information about well-characterized proteins to derive protein signatures. Collaborating databases include SWISS-PROT, PROSITE, TrEMBL, PRINTS, Propom and Pfam, Smart and TIGRFAMs. Pfam is a large collection of multiple sequence alignments and hidden Markov models covering many common protein domains and families. Pfam is hosted at the Sanger Institute server in the United Kingdom. Interpro is hosted at the European Bioinformatics Institute in the United Kingdom.

[0449] The results of the InterPro scan of the polypeptide sequence as represented by SEQ ID NO: 119 are presented in Table C3.

TABLE C3
InterPro scan results (major accession numbers) of the polypeptide
sequence as represented by SEQ ID NO: 119.

| | | | Amino acid |
|---|---|---|---|
| | Accession | | coordinates on |
| Database | number | Accession name | SEQ ID NO 119 |
| InterPro | IPR013407 | CRISPR-associated | |
| | | protein Crm2 | |
| HMMTigr | TIGR02577 | cas_TM1794_Crm2: | [221-842] 8.7e-13 |
| | | CRISPR-associated pr | |

### Example 5

### Topology Prediction of the Polypeptide Sequences Useful in Performing the Methods of the Invention

### 1. SGT1 Polypeptides

[0450] TargetP 1.1 predicts the subcellular location of eukaryotic proteins. The location assignment is based on the predicted presence of any of the N-terminal pre-sequences: chloroplast transit peptide (cTP), mitochondrial targeting peptide (mTP) or secretory pathway signal peptide (SP). Scores on which the final prediction is based are not really probabilities, and they do not necessarily add to one. However, the location with the highest score is the most likely according to TargetP, and the relationship between the scores (the reliability class) may be an indication of how certain the prediction is. The reliability class (RC) ranges from 1 to 5, where 1 indicates the strongest prediction. TargetP is maintained at the server of the Technical University of Denmark.

[0451] For the sequences predicted to contain an N-terminal pre-sequence a potential cleavage site can also be predicted.

[0452] A number of parameters are selected, such as organism group (non-plant or plant), cutoff sets (none, predefined set of cutoffs, or user-specified set of cutoffs), and the calculation of prediction of cleavage sites (yes or no).

[0453] Many other algorithms can be used to perform such analyses, including:
[0454] ChloroP 1.1 hosted on the server of the Technical University of Denmark;
[0455] Protein Prowler Subcellular Localisation Predictor version 1.2 hosted on the server of the Institute for Molecular Bioscience, University of Queensland, Brisbane, Australia;
[0456] PENCE Proteome Analyst PA-GOSUB 2.5 hosted on the server of the University of Alberta, Edmonton, Alberta, Canada;
[0457] TMHMM, hosted on the server of the Technical University of Denmark
[0458] PSORT (URL: psort.org)
[0459] PLOC (Park and Kanehisa, Bioinformatics, 19, 1656-1663, 2003).

### 2. CLC-pKG Polypeptides

[0460] TargetP 1.1 predicts the subcellular location of eukaryotic proteins. The location assignment is based on the predicted presence of any of the N-terminal pre-sequences: chloroplast transit peptide (cTP), mitochondrial targeting peptide (mTP) or secretory pathway signal peptide (SP). Scores on which the final prediction is based are not really probabilities, and they do not necessarily add to one. However, the location with the highest score is the most likely according to TargetP, and the relationship between the scores (the reliability class) may be an indication of how certain the prediction is. The reliability class (RC) ranges from 1 to 5, where 1 indicates the strongest prediction. TargetP is maintained at the server of the Technical University of Denmark.

[0461] For the sequences predicted to contain an N-terminal presequence a potential cleavage site can also be predicted.

[0462] In addition or alternatively, many other algorithms can be used to perform such analyses, including:
[0463] ChloroP 1.1 hosted on the server of the Technical University of Denmark;
[0464] Protein Prowler Subcellular Localisation Predictor version 1.2 hosted on the server of the Institute for Molecular Bioscience, University of Queensland, Brisbane, Australia;
[0465] PENCE Proteome Analyst PA-GOSUB 2.5 hosted on the server of the University of Alberta, Edmonton, Alberta, Canada;
[0466] TMHMM, hosted on the server of the Technical University of Denmark
[0467] PSORT (URL: psort.org)
[0468] PLOC (Park and Kanehisa, Bioinformatics, 19, 1656-1663, 2003).

### 3. HD-Hydrolase-Like Polypeptides

[0469] TargetP 1.1 predicts the subcellular location of eukaryotic proteins. The location assignment is based on the predicted presence of any of the N-terminal pre-sequences: chloroplast transit peptide (cTP), mitochondrial targeting peptide (mTP) or secretory pathway signal peptide (SP). Scores on which the final prediction is based are not really probabilities, and they do not necessarily add to one. However, the location with the highest score is the most likely according to TargetP, and the relationship between the scores (the reliability class) may be an indication of how certain the prediction is. The reliability class (RC) ranges from 1 to 5, where 1 indicates the strongest prediction. TargetP is maintained at the server of the Technical University of Denmark.

[0470] For the sequences predicted to contain an N-terminal presequence a potential cleavage site can also be predicted.

[0471] A number of parameters were selected, such as organism group (non-plant or plant), cutoff sets (none, predefined set of cutoffs, or user-specified set of cutoffs), and the calculation of prediction of cleavage sites (yes or no).

[0472] The results of TargetP 1.1 analysis of the polypeptide sequence as represented by SEQ ID NO: 119 are presented Table D1. The “plant” organism group has been selected, no cutoffs defined, and the predicted length of the transit peptide requested. The subcellular localization of the polypeptide sequence as represented by SEQ ID NO: 119 may be the cytoplasm or nucleus, no transit peptide is predicted.

TABLE D1
TargetP 1.1 analysis of the polypeptide sequence as
represented by SEQ ID NO: 119.

| Name | Len | cTP | mTP | SP | other | Loc | RC | TPlen |
|---|---|---|---|---|---|---|---|---|
| SEQ ID | 979 | 0.103 | 0.321 | 0.050 | 0.554 | — | 4 | — |
| NO: 119 | | | | | | | | |
| cutoff | 0.000 | 0.000 | 0.000 | 0.000 | | | | |

Abbreviations: Len, Length; cTP, Chloroplastic transit peptide; mTP, Mitochondrial transit peptide; SP, Secretory pathway signal peptide; other, Other subcellular targeting; Loc, Predicted Location; RC, Reliability class; TPlen, Predicted transit peptide length.

[0473] Many other algorithms can be used to perform such analyses, including:
[0474] ChloroP 1.1 hosted on the server of the Technical University of Denmark;
[0475] Protein Prowler Subcellular Localisation Predictor version 1.2 hosted on the server of the Institute for Molecular Bioscience, University of Queensland, Brisbane, Australia;
[0476] PENCE Proteome Analyst PA-GOSUB 2.5 hosted on the server of the University of Alberta, Edmonton, Alberta, Canada;
[0477] TMHMM, hosted on the server of the Technical University of Denmark
[0478] PSORT (URL: psort.org)
[0479] PLOC (Park and Kanehisa, Bioinformatics, 19, 1656-1663, 2003).

### Example 6

### Assay Related to the Polypeptide Sequences Useful in Performing the Methods of the Invention

### 1. CLC-pKG Polypeptides

[0480] Marmagne et al 2007 described a method functionally complements the gef-1 yeast mutant. In brief, suspensions of the indicated strains W303 (WT), RGY86 (gef-1 mutant) and each transformant (gef-1:CLC-of interest) are set up at DO1 (53108 cells). Serial dilutions (d1-d16) are spotted onto the appropriate media. For the low-iron phenotype, a 4-folddilution of each suspension may be spotted onto YPEG media supplemented with 0.6 mM ferrozine, pH 5.8 (A, B) and grown for 3 d at 30 _C. For the pH-dependent phenotype, an 8-fold dilution is spotted onto YPD (C), SD 6 0.1 mM CuSO4, pH 7 (D, E) and SGE 6 CuSO4 0.1 mM, pH7 (F, G) media and is grown for 3 d at 30 _C.

[0481] In addition or alternatively the patch clamp based method described by De Angeli (Nature 442, 939-942, 2006) may be used to measure currents across the tonoplast. The patch clamp technique is well known in the art for studying ion channel activity in cells, see for example Hamill et al., Pflügers Archiv (European Journal of Physiology) 391, 85-100, 1981.

### Example 7

### Cloning of the Nucleic Acid Sequence Used in the Methods of the Invention

### 1. SGT1 Polypeptides

[0482] The nucleic acid sequence was amplified by PCR using as template a Capsicum annuum cDNA library (in pCMV Sport 6.0; Invitrogen, Paisley, UK). PCR was performed using Hifi Taq DNA polymerase in standard conditions, using 200 ng of template in a 50 μl PCR mix. The primers used were prm14133 (SEQ ID NO: 51; sense, start codon in bold): 5′-aaaaa gcaggctcacaatggagaatgggaaaagagac-3′ and prm14134 (SEQ ID NO: 52; reverse, complementary): 5′-agaaagctgggttggttttaactagttccaccg-3′, which include the AttB sites for Gateway recombination. The amplified PCR fragment was purified also using standard methods. The first step of the Gateway procedure, the BP reaction, was then performed, during which the PCR fragment recombined in vivo with the pDONR201 plasmid to produce, according to the Gateway terminology, an “entry clone”, pSGT1. Plasmid pDONR201 was purchased from Invitrogen, as part of the Gateway® technology.

[0483] The entry clone comprising SEQ ID NO: 1 was then used in an LR reaction with a destination vector used for Oryza sativa transformation. This vector contained as functional elements within the T-DNA borders: a plant selectable marker; a screenable marker expression cassette; and a Gateway cassette intended for LR in vivo recombination with the nucleic acid sequence of interest already cloned in the entry clone. A rice RCc3 promoter (SEQ ID NO: 50) for root-specific expression was located upstream of this Gateway cassette.

[0484] After the LR recombination step, the resulting expression vector pRCc3::SGT1 (FIG. 4) was transformed into Agrobacterium strain LBA4044 according to methods well known in the art.

### 2. CLC-pKG Polypeptides

[0485] The nucleic acid sequence was amplified by PCR using as template a custom-made Synechosystis DNA. PCR was performed using Hifi Taq DNA polymerase in standard conditions, using 200 ng of template in a 50 μl PCR mix. The primers used were: 5′-ggggacaagtttgtacaaaaaagcaggcttaaacaatggcttggtttccctttt-3′ (SEQ ID NO: 116) and 5′-ggggaccactttgtacaagaaagctgggtttactcgtctagaccgaaatctg-3′ (SEQ ID NO: 117), which include the AttB sites for Gateway recombination. The amplified PCR fragment was purified also using standard methods. The first step of the Gateway procedure, the BP reaction, was then performed, during which the PCR fragment recombined in vivo with the pDONR201 plasmid to produce, according to the Gateway terminology, an “entry clone”, pCLC-pKG. Plasmid pDONR201 was purchased from Invitrogen, as part of the Gateway® technology.

[0486] The entry clone comprising the longest Open Reading Frame of SEQ ID NO: 53 was then used in an LR reaction with a destination vector used for Oryza sativa transformation. This vector contained as functional elements within the T-DNA borders: a plant selectable marker; a screenable marker expression cassette; and a Gateway cassette intended for LR in vivo recombination with the nucleic acid sequence of interest already cloned in the entry clone. A rice RCc3 promoter (SEQ ID NO: 115) for root specific expression was located upstream of this Gateway cassette.

[0487] After the LR recombination step, the resulting expression vector pGOS2::CLC-pKG (FIG. 7) was transformed into Agrobacterium strain LBA4044 according to methods well known in the art.

### 3. HD-Hydrolase-Like Polypeptides

[0488] The nucleic acid sequence was amplified by PCR using as template a custom-made Synechocystis cDNA library (in pCMV Sport 6.0; Invitrogen, Paisley, UK). PCR was performed using Hifi Taq DNA polymerase in standard conditions, using 200 ng of template in a 50 μl PCR mix. The primers used were prm14240 (SEQ ID NO: 165; sense, start codon in bold): 5′-ggggacaagtttgtacaaaaaagcaggcttaaacaatgtctgaagtttactggcaag-3′ and prm14239 (SEQ ID NO: 166; reverse, complementary): 5′-ggggaccactttgtacaagaaagctgggtttaattgggaa atttaatgtaacg-3′, which include the AttB sites for Gateway recombination. The amplified PCR fragment was purified also using standard methods. The first step of the Gateway procedure, the BP reaction, was then performed, during which the PCR fragment recombined in vivo with the pDONR201 plasmid to produce, according to the Gateway terminology, an “entry clone”, pHD-hydrolase-like. Plasmid pDONR201 was purchased from Invitrogen, as part of the Gateway® technology.

[0489] The entry clone comprising SEQ ID NO: 118 was then used in an LR reaction with a destination vector used for Oryza sativa transformation. This vector contained as functional elements within the T-DNA borders: a plant selectable marker; a screenable marker expression cassette; and a Gateway cassette intended for LR in vivo recombination with the nucleic acid sequence of interest already cloned in the entry clone. A rice GOS2 promoter (SEQ ID NO: 164) for constitutive specific expression was located upstream of this Gateway cassette.

[0490] After the LR recombination step, the resulting expression vector pGOS2::HD-hydrolase-like (FIG. 11) was transformed into Agrobacterium strain LBA4044 according to methods well known in the art.

### Example 8

### Plant Transformation

### Rice Transformation

[0491] The Agrobacterium containing the expression vector was used to transform Oryza sativa plants. Mature dry seeds of the rice japonica cultivar Nipponbare were dehusked. Sterilization was carried out by incubating for one minute in 70% ethanol, followed by 30 minutes in 0.2% HgCl₂, followed by a 6 times 15 minutes wash with sterile distilled water. The sterile seeds were then germinated on a medium containing 2,4-D (callus induction medium). After incubation in the dark for four weeks, embryogenic, scutellum-derived calli were excised and propagated on the same medium. After two weeks, the calli were multiplied or propagated by subculture on the same medium for another 2 weeks. Embryogenic callus pieces were sub-cultured on fresh medium 3 days before co-cultivation (to boost cell division activity).

[0492] Agrobacterium strain LBA4404 containing the expression vector was used for co-cultivation. Agrobacterium was inoculated on AB medium with the appropriate antibiotics and cultured for 3 days at 28° C. The bacteria were then collected and suspended in liquid co-cultivation medium to a density (OD₆₀₀) of about 1. The suspension was then transferred to a Petri dish and the calli immersed in the suspension for 15 minutes. The callus tissues were then blotted dry on a filter paper and transferred to solidified, co-cultivation medium and incubated for 3 days in the dark at 25° C. Co-cultivated calli were grown on 2,4-D-containing medium for 4 weeks in the dark at 28° C. in the presence of a selection agent. During this period, rapidly growing resistant callus islands developed. After transfer of this material to a regeneration medium and incubation in the light, the embryogenic potential was released and shoots developed in the next four to five weeks. Shoots were excised from the calli and incubated for 2 to 3 weeks on an auxin-containing medium from which they were transferred to soil. Hardened shoots were grown under high humidity and short days in a greenhouse.

[0493] Approximately 35 independent T0 rice transformants were generated for one construct. The primary transformants were transferred from a tissue culture chamber to a greenhouse. After a quantitative PCR analysis to verify copy number of the T-DNA insert, only single copy transgenic plants that exhibit tolerance to the selection agent were kept for harvest of T1 seed. Seeds were then harvested three to five months after transplanting. The method yielded single locus transformants at a rate of over 50% (Aldemita and Hodges1996, Chan et al. 1993, Hiei et al. 1994).

### Example 9

### Transformation of Other Crops

### Corn Transformation

[0494] Transformation of maize (Zea mays) is performed with a modification of the method described by Ishida et al. (1996) Nature Biotech 14(6): 745-50. Transformation is genotype-dependent in corn and only specific genotypes are amenable to transformation and regeneration. The inbred line A188 (University of Minnesota) or hybrids with A188 as a parent are good sources of donor material for transformation, but other genotypes can be used successfully as well. Ears are harvested from corn plant approximately 11 days after pollination (DAP) when the length of the immature embryo is about 1 to 1.2 mm. Immature embryos are cocultivated with Agrobacterium tumefaciens containing the expression vector, and transgenic plants are recovered through organogenesis. Excised embryos are grown on callus induction medium, then maize regeneration medium, containing the selection agent (for example imidazolinone but various selection markers can be used). The Petri plates are incubated in the light at 25° C. for 2-3 weeks, or until shoots develop. The green shoots are transferred from each embryo to maize rooting medium and incubated at 25° C. for 2-3 weeks, until roots develop. The rooted shoots are transplanted to soil in the greenhouse. T1 seeds are produced from plants that exhibit tolerance to the selection agent and that contain a single copy of the T-DNA insert.

### Wheat Transformation

[0495] Transformation of wheat is performed with the method described by lshida et al. (1996) Nature Biotech 14(6): 745-50. The cultivar Bobwhite (available from CIMMYT, Mexico) is commonly used in transformation. Immature embryos are co-cultivated with Agrobacterium tumefaciens containing the expression vector, and transgenic plants are recovered through organogenesis. After incubation with Agrobacterium, the embryos are grown in vitro on callus induction medium, then regeneration medium, containing the selection agent (for example imidazolinone but various selection markers can be used). The Petri plates are incubated in the light at 25° C. for 2-3 weeks, or until shoots develop. The green shoots are transferred from each embryo to rooting medium and incubated at 25° C. for 2-3 weeks, until roots develop. The rooted shoots are transplanted to soil in the greenhouse. T1 seeds are produced from plants that exhibit tolerance to the selection agent and that contain a single copy of the T-DNA insert.

### Soybean Transformation

[0496] Soybean is transformed according to a modification of the method described in the Texas A&M U.S. Pat. No. 5,164,310. Several commercial soybean varieties are amenable to transformation by this method. The cultivar Jack (available from the Illinois Seed foundation) is commonly used for transformation. Soybean seeds are sterilised for in vitro sowing. The hypocotyl, the radicle and one cotyledon are excised from seven-day old young seedlings. The epicotyl and the remaining cotyledon are further grown to develop axillary nodes. These axillary nodes are excised and incubated with Agrobacterium tumefaciens containing the expression vector. After the cocultivation treatment, the explants are washed and transferred to selection media. Regenerated shoots are excised and placed on a shoot elongation medium. Shoots no longer than 1 cm are placed on rooting medium until roots develop. The rooted shoots are transplanted to soil in the greenhouse. T1 seeds are produced from plants that exhibit tolerance to the selection agent and that contain a single copy of the T-DNA insert.

### Rapeseed/Canola Transformation

[0497] Cotyledonary petioles and hypocotyls of 5-6 day old young seedling are used as explants for tissue culture and transformed according to Babic et al. (1998, Plant Cell Rep 17: 183-188). The commercial cultivar Westar (Agriculture Canada) is the standard variety used for transformation, but other varieties can also be used. Canola seeds are surface-sterilized for in vitro sowing. The cotyledon petiole explants with the cotyledon attached are excised from the in vitro seedlings, and inoculated with Agrobacterium (containing the expression vector) by dipping the cut end of the petiole explant into the bacterial suspension. The explants are then cultured for 2 days on MSBAP-3 medium containing 3 mg/l BAP, 3% sucrose, 0.7% Phytagar at 23° C., 16 hr light. After two days of co-cultivation with Agrobacterium, the petiole explants are transferred to MSBAP-3 medium containing 3 mg/l BAP, cefotaxime, carbenicillin, or timentin, (300 mg/l) for 7 days, and then cultured on MSBAP-3 medium with cefotaxime, carbenicillin, or timentin and selection agent until shoot regeneration. When the shoots are 5-10 mm in length, they are cut and transferred to shoot elongation medium (MSBAP-0.5, containing 0.5 mg/l BAP). Shoots of about 2 cm in length are transferred to the rooting medium (MS0) for root induction. The rooted shoots are transplanted to soil in the greenhouse. T1 seeds are produced from plants that exhibit tolerance to the selection agent and that contain a single copy of the T-DNA insert.

### Alfalfa Transformation

[0498] A regenerating clone of alfalfa (Medicago sativa) is transformed using the method of (McKersie et al., 1999 Plant Physiol 119: 839-847). Regeneration and transformation of alfalfa is genotype dependent and therefore a regenerating plant is required. Methods to obtain regenerating plants have been described. For example, these can be selected from the cultivar Rangelander (Agriculture Canada) or any other commercial alfalfa variety as described by Brown DCW and A Atanassov (1985. Plant Cell Tissue Organ Culture 4: 111-112). Alternatively, the RA3 variety (University of Wisconsin) has been selected for use in tissue culture (Walker et al., 1978 μm J Bot 65:654-659). Petiole explants are cocultivated with an overnight culture of Agrobacterium tumefaciens C58C1 pMP90 (McKersie et al., 1999 Plant Physiol 119: 839-847) or LBA4404 containing the expression vector. The explants are cocultivated for 3 d in the dark on SH induction medium containing 288 mg/L Pro, 53 mg/L thioproline, 4.35 g/L K2SO4, and 100 μm acetosyringinone. The explants are washed in half-strength Murashige-Skoog medium (Murashige and Skoog, 1962) and plated on the same SH induction medium without acetosyringinone but with a suitable selection agent and suitable antibiotic to inhibit Agrobacterium growth. After several weeks, somatic embryos are transferred to BOi2Y development medium containing no growth regulators, no antibiotics, and 50 g/L sucrose. Somatic embryos are subsequently germinated on half-strength Murashige-Skoog medium. Rooted seedlings were transplanted into pots and grown in a greenhouse. T1 seeds are produced from plants that exhibit tolerance to the selection agent and that contain a single copy of the T-DNA insert.

### Cotton Transformation

[0499] Cotton is transformed using Agrobacterium tumefaciens according to the method described in U.S. Pat. No. 5,159,135. Cotton seeds are surface sterilised in 3% sodium hypochlorite solution during 20 minutes and washed in distilled water with 500 μg/ml cefotaxime. The seeds are then transferred to SH-medium with 50 μg/ml benomyl for germination. Hypocotyls of 4 to 6 days old seedlings are removed, cut into 0.5 cm pieces and are placed on 0.8% agar. An Agrobacterium suspension (approx. 108 cells per ml, diluted from an overnight culture transformed with the gene of interest and suitable selection markers) is used for inoculation of the hypocotyl explants. After 3 days at room temperature and lighting, the tissues are transferred to a solid medium (1.6 g/l Gelrite) with Murashige and Skoog salts with B5 vitamins (Gamborg et al., Exp. Cell Res. 50:151-158 (1968)), 0.1 mg/l 2,4-D, 0.1 mg/l 6-furfurylaminopurine and 750 μg/ml MgCL2, and with 50 to 100 μg/ml cefotaxime and 400-500 μg/ml carbenicillin to kill residual bacteria. Individual cell lines are isolated after two to three months (with subcultures every four to six weeks) and are further cultivated on selective medium for tissue amplification (30° C., 16 hr photoperiod). Transformed tissues are subsequently further cultivated on non-selective medium during 2 to 3 months to give rise to somatic embryos. Healthy looking embryos of at least 4 mm length are transferred to tubes with SH medium in fine vermiculite, supplemented with 0.1 mg/l indole acetic acid, 6 furfurylaminopurine and gibberellic acid. The embryos are cultivated at 30° C. with a photoperiod of 16 hrs, and plantlets at the 2 to 3 leaf stage are transferred to pots with vermiculite and nutrients. The plants are hardened and subsequently moved to the greenhouse for further cultivation.

### Example 10

### Phenotypic Evaluation Procedure

### 10.1 Evaluation Setup

[0500] Approximately 35 independent T0 rice transformants were generated. The primary transformants were transferred from a tissue culture chamber to a greenhouse for growing and harvest of T1 seed. Six events, of which the T1 progeny segregated 3:1 for presence/absence of the transgene, were retained. For each of these events, approximately 10 T1 seedlings containing the transgene (hetero- and homo-zygotes) and approximately 10 T1 seedlings lacking the transgene (nullizygotes) were selected by monitoring visual marker expression. The transgenic plants and the corresponding nullizygotes were grown side-by-side at random positions. Greenhouse conditions were of shorts days (12 hours light), 28° C. in the light and 22° C. in the dark, and a relative humidity of 70%. Plants grown under non-stress conditions were watered at regular intervals to ensure that water and nutrients were not limiting and to satisfy plant needs to complete growth and development.

[0501] Four T1 events were further evaluated in the T2 generation following the same evaluation procedure as for the T1 generation but with more individuals per event. From the stage of sowing until the stage of maturity the plants were passed several times through a digital imaging cabinet. At each time point digital images (2048×1536 pixels, 16 million colours) were taken of each plant from at least 6 different angles.

### 10.2 Statistical Analysis: F Test

[0502] A two factor ANOVA (analysis of variants) was used as a statistical model for the overall evaluation of plant phenotypic characteristics. An F test was carried out on all the parameters measured of all the plants of all the events transformed with the gene of the present invention. The F test was carried out to check for an effect of the gene over all the transformation events and to verify for an overall effect of the gene, also known as a global gene effect. The threshold for significance for a true global gene effect was set at a 5% probability level for the F test. A significant F test value points to a gene effect, meaning that it is not only the mere presence or position of the gene that is causing the differences in phenotype.

[0503] Where two experiments with overlapping events were carried out, a combined analysis was performed. This is useful to check consistency of the effects over the two experiments, and if this is the case, to accumulate evidence from both experiments in order to increase confidence in the conclusion. The method used was a mixed-model approach that takes into account the multilevel structure of the data (i.e. experiment-event-segregants). P values were obtained by comparing likelihood ratio test to chi square distributions.

### 10.3 Parameters Measured

### Biomass-Related Parameter Measurement

[0504] From the stage of sowing until the stage of maturity the plants were passed several times through a digital imaging cabinet. At each time point digital images (2048×1536 pixels, 16 million colours) were taken of each plant from at least 6 different angles.

[0505] The plant aboveground area (or leafy biomass) was determined by counting the total number of pixels on the digital images from aboveground plant parts discriminated from the background. This value was averaged for the pictures taken on the same time point from the different angles and was converted to a physical surface value expressed in square mm by calibration. Experiments show that the aboveground plant area measured this way correlates with the biomass of plant parts above ground. The above ground area is the area measured at the time point at which the plant had reached its maximal leafy biomass. The early vigour is the plant (seedling) aboveground area three weeks post-germination. Increase in root biomass is expressed as an increase in total root biomass (measured as maximum biomass of roots observed during the lifespan of a plant); or as an increase in the root/shoot index (measured as the ratio between root mass and shoot mass in the period of active growth of root and shoot).

[0506] Early vigour was determined by counting the total number of pixels from aboveground plant parts discriminated from the background. This value was averaged for the pictures taken on the same time point from different angles and was converted to a physical surface value expressed in square mm by calibration. The results described below are for plants three weeks post-germination.

### Seed-Related Parameter Measurements

[0507] The mature primary panicles were harvested, counted, bagged, barcode-labelled and then dried for three days in an oven at 37° C. The panicles were then threshed and all the seeds were collected and counted. The filled husks were separated from the empty ones using an air-blowing device. The empty husks were discarded and the remaining fraction was counted again. The filled husks were weighed on an analytical balance. The number of filled seeds was determined by counting the number of filled husks that remained after the separation step. The total seed yield was measured by weighing all filled husks harvested from a plant. Total seed number per plant was measured by counting the number of husks harvested from a plant. Thousand Kernel Weight (TKW) is extrapolated from the number of filled seeds counted and their total weight. The Harvest Index (HI) in the present invention is defined as the ratio between the total seed yield and the above ground area (mm²), multiplied by a factor 10⁶. The total number of flowers per panicle as defined in the present invention is the ratio between the total number of seeds and the number of mature primary panicles. The seed fill rate as defined in the present invention is the proportion (expressed as a %) of the number of filled seeds over the total number of seeds (or florets).

### Examples 11

### Results of the Phenotypic Evaluation of the Transgenic Plants

### 1. SGT1 Polypeptides

[0508] The results of the evaluation of transgenic rice plants in the T2 generation and expressing a nucleic acid comprising the longest Open Reading Frame in SEQ ID NO: 1 under non-stress conditions are presented below.

| Parameter | % Overall |
|---|---|
| Total weight seeds | 10.5 |
| Fill rate | 10.6 |
| Harvest index | 10.0 |
| Number filled seeds | 11.3 |
| Number of Flowers per.panicle | 6.6 |

[0509] For each parameter, the percentage overall difference between transgenic and control plants (corresponding nullizygotes) is shown if value reaches p<0.05 and above the 5% threshold.

### 2. CLC-pKG Polypeptides

[0510] The results of the evaluation of transgenic rice plants in the T1 generation and expressing a nucleic acid comprising the Open Reading Frame in SEQ ID NO: 53 encoding the polypeptide of SEQ ID NO: 54 under non-stress conditions are presented below. See previous Examples for details on the generations of the transgenic plants.

[0511] The results of the evaluation of transgenic rice plants under non-stress conditions are presented below. An increase of at least 5% was observed for aboveground biomass (AreaMax), plant height (HeightMax), emergence vigour (early vigour; EmerVigor), root biomass (RootMax), total seed yield (totalwgseeds), harvest index (harvestindex), Proportion of thick roots compared to thin roots (RootThickMax), Gravity center of the canopy of the plants (GravityYMax). The last two parameters are indicative of a change in the architecture of the root system and of the canopy of the plant, respectively.

TABLE E1
Data summary for transgenic rice plants; for each
yield-related trait, the overall percent increase is shown
for the T1 generation, for each parameter the p-value is <0.05.

| | % increase in the transgenic |
|---|---|
| Yield related trait | compared to the control plants |
| AreaMax | 10.6 |
| EmerVigor | 6.0 |
| RootMax | 11.1 |
| totalwgseeds | 17.4 |
| harvestindex | 9.3 |
| HeightMax | 5.7 |
| GravityYMax | 7.3 |
| RootThickMax | 7.8 |

### 3. HD-Hydrolase-Like Polypeptides

[0512] The results of the evaluation of transgenic T1 rice plants and expressing a nucleic acid encoding the polypeptide of SEQ ID NO: 119 under non-stress conditions are presented below in Table E2.

TABLE E2
Data summary for transgenic rice plants; for each
parameter, the overall percent increase is shown
for the confirmation (T1 generation), for each
parameter the p-value is <0.05.

| Parameter | Overall increase |
|---|---|
| totalwgseeds | 15.4 |
| fillrate | 12.7 |
| harvestindex | 14.1 |
| flowerperpan | 9.2 |
| Height | 7.0 |

1-60. (canceled)

61. A method for enhancing a yield-related trait in a plant relative to a corresponding control plant, comprising modulating expression in a plant of a nucleic acid encoding one of:
(i) an SGT1 polypeptide, wherein said SGT1 polypeptide comprises the following in any order:
a) at least one tetratricopeptide (TPR) repeat;
b) at least one CS domain; and
c) an SGS domain;
(ii) a CLC-pKG polypeptide, wherein said CLC-pKG polypeptide comprises a Voltage_CLC domain (Pfam entry PF00654) and a CBS domain (Pfam entry PF00571) and optionally a USP domain (PF00582); or
(iii) an HD-hydrolase-like polypeptide, wherein said HD-hydrolase-like polypeptide comprises a CRISPR-associated protein Crm2 domain.

62. The method of claim 61, wherein
(a) the CLC-pKG polypeptide comprises a domain having at least 25% sequence identity to:
(i) the CLC domain located between amino acids 77 and 422 of SEQ ID NO: 54;
(ii) the CBS domain located between amino acids 455 to 510 or amino acids 516 to 571 of SEQ ID NO: 54; and optionally
(iii) the USP domain located between amino acids 597 to 731 of SEQ ID NO: 54; or
(b) the HD-hydrolase-like polypeptide comprises one or more of motifs 11 to 26 (SEQ ID NO: 148-163).

63. The method of claim 61, wherein the modulated expression is effected by introducing and expressing the nucleic acid in a plant.

64. The method of claim 61, wherein
(i) the nucleic acid encoding an SGT1 polypeptide encodes any one of the proteins listed in Table A1, or is a portion of such a nucleic acid, or a nucleic acid capable of hybridizing with such a nucleic acid;
(ii) the nucleic acid encoding a CLC-pKG polypeptide encodes any one of the proteins listed in Table A2, or is a portion of such a nucleic acid, or a nucleic acid capable of hybridizing with such a nucleic acid;
(iii) the nucleic acid encoding a HD-hydrolase-like polypeptide encodes any one of the proteins listed in Table A3, or is a portion of such a nucleic acid, or a nucleic acid capable of hybridizing with such a nucleic acid.

65. The method of claim 61, wherein the nucleic acid sequence encodes an orthologue or paralogue of any of the proteins given in Table A1, Table A2, or Table A3.

66. The method of claim 61, wherein the enhanced yield-related trait comprises increased yield, increased biomass, and/or increased seed yield relative to a corresponding control plant.

67. The method of claim 61, wherein the enhanced yield-related trait is obtained under non-stress conditions or under conditions of drought stress or salt stress.

68. A transgenic plant or part thereof, including a seed, obtained by the method of claim 61, wherein said transgenic plant or part thereof comprises a recombinant nucleic acid encoding any one of an SGT1 polypeptide, a CLC-pKG polypeptide, or a HD-hydrolase-like polypeptide.

69. A construct comprising:
(i) a nucleic acid encoding any one of:
(a) an SGT1 polypeptide, wherein said SGT1 polypeptide comprises the following in any order:
1) at least one tetratricopeptide (TPR) repeat;
2) at least one CS domain; and
3) an SGS domain;
(b) a CLC-pKG polypeptide, wherein said CLC-pKG polypeptide comprises a Voltage_CLC domain (Pfam entry PF00654) and a CBS domain (Pfam entry PF00571) and optionally a USP domain (PF00582); or
(c) an HD-hydrolase-like polypeptide, wherein said HD-hydrolase-like polypeptide comprises a CRISPR-associated protein Crm2 domain.
(ii) one or more control sequences capable of driving expression of the nucleic acid sequence of (i); and optionally
(iii) a transcription termination sequence.

70. A method for making a plant having increased yield, increased biomass, and/or increased seed yield relative to a corresponding control plant, comprising transforming a plant with the construct of claim 69.

71. A plant, plant part, or plant cell comprising the construct of claim 69.

72. A method for the production of a transgenic plant having increased yield relative to a corresponding control plant, comprising:
i) introducing and expressing in a plant a nucleic acid encoding one of an SGT1 polypeptide as defined in claim 61; a CLC-pKG polypeptide as defined in claim 61; or a HD-hydrolase-like polypeptide as defined in claim 61; and
ii) cultivating the plant cell under conditions promoting plant growth and development.

73. A transgenic plant having increased yield relative to a corresponding control plant, resulting from modulated expression of a nucleic acid encoding one of an SGT1 polypeptide as defined in claim 61; a CLC-pKG polypeptide as defined in claim 61; or a HD-hydrolase-like polypeptide as defined in claim 61, or a transgenic plant cell derived from said transgenic plant.

74. The transgenic plant of claim 68, or a transgenic plant cell derived therefrom, wherein said transgenic plant is a crop plant, a monocot, a cereal, rice, maize, wheat, barley, millet, rye, triticale, sorghum, emmer, spelt, secale, einkorn, teff, milo, or oats.

75. Harvestable parts of the plant of claim 74, wherein said harvestable parts are shoot biomass and/or seeds.

76. Products derived from the plant of claim 74 and/or from harvestable parts of said plant, wherein said harvestable parts are shoot biomass and/or seeds.

77. A method of selecting a plant having increased yield relative to a corresponding control plant, the method comprising selecting a plant with a molecular marker comprising a nucleic acid encoding an SGT1 polypeptide.

The application's sequence listing, which the Patent Office published only in electronic form, follows.

SEQUENCE LISTING (166 sequences)

SEQ ID NO: 1 - DNA, 1341 bp, Capsicum annuum
cgttgcacaaattgatgagcaatgcttttttataatgccaactttgtacaaaaaagcaggcttaaacaatggcgtccgatcttgaaactagggctaaagaagccttcattgatgaccactttgaactcgccgttgacctttatactcaagccatatcgttgagccctaaaaaccctgagcttttcgctgaccgtgctcaggccaatattaaactcaattatttcactgaagctgttgttgatgcgaacaaggccattgagttggatccttacatgtcaaaagcttatttgcgtaaggggttggcctgtatgaagctcgaagaataccaaactgcgaaggcagctttggaaactggtgctagtttagcaccaggagagtctaggttcacaaagctaatgaaagaatgtgatgaaagcattgcagaggaagctggagaactgcctaatatctctctggaaaaaacctcggctaatgctgttgcgtcttctgcatctgagttgtcggacaatgttgctattgcgcctagagatcctcaatcaactgtcaacctgtcccatcaagaatctgctgccaaaccaaaatacagacatgagttttatcagaaaccagaggaggtggttgtgactatatttgccaagggcataccagccaagaatgttgttgttgactttggtgaacaaatactaagtgttagcattgatttgccgggtggagaaacttattctttccagcctaggttgtttggcaagataacacctgcaaaatgcagatatgaagtaatgtctaccaaaattgagatccgccttgcaaaagctgaaccattgcactggacatctcttgattatacaagggagcctgtcgtaattcacaggcctgttgtgtcatcagctgccccgcggcccagttacccttcctcaaaactgagaaacgtggattgggataaactagaagctcaagtgaaaaaagaggaaaaagatgaaaaattggatggagatgctgcattgaacaaatttttccgagacatttacaaagatgctgacgaggacaccagaagagccatgatgaaatcctttgtggaatctaatgggactgttctgtcgacaaactggaaaaaagttggcacaaagaaggttgaaggaagccctccggatggcatggagttgaagaaatgggagatttagagtcaatctgctgtttatcttttgtgacccagctttcttgtacaaagttggcattataagaaagcattgcttatcaatttgttgcaacgaacaggtcactatcggtcaaaataaaatcattatttgccatccagctgatattcccctatagtgagtcgta

SEQ ID NO: 2 - protein, 370 aa, Capsicum annuum
MASDLETRAKEAFIDDHFELAVDLYTQAISLSPKNPELFADRAQANIKLNYFTEAVVDANKAIELDPYMSKAYLRKGLACMKLEEYQTAKAALETGASLAPGESRFTKLMKECDESIAEEAGELPNISLEKTSANAVASSASELSDNVAIAPRDPQSTVNLSHQESAAKPKYRHEFYQKPEEVVVTIFAKGIPAKNVVVDFGEQILSVSIDLPGGETYSFQPRLFGKITPAKCRYEVMSTKIEIRLAKAEPLHWTSLDYTREPVVIHRPVVSSAAPRPSYPSSKLRNVDWDKLEAQVKKEEKDEKLDGDAALNKFFRDIYKDADEDTRRAMMKSFVESNGTVLSTNWKKVGTKKVEGSPPDGMELKKWEI

SEQ ID NO: 3 - DNA, 1387 bp, Arabidopsis thaliana
aactccctgaacacaagtcgcataaaacgaaggaacaatctagaagaagaacgataacatccaatctctctttatattccttccttccattgtggcaataatcaatcgatggcgaaggagcttgctgataaggctaaagaggctttcgtagacgatgacttcgatgttgctgttgacttgtactccaaagccattgacttggatcctaattgcgctgagttcttcgctgatcgtgctcaggcctatatcaaactcgaaagcttcactgaggccgtggcagatgcgaacaaagcaattgagttggatccttcattgaccaaagcttacctaagaaaaggaactgcctgtatgaagcttgaagagtatcggactgctaaaacagctcttgaaaagggtgcctctatcacgccgagtgaatccaaatttaagaagttgatagatgaatgcaattttctaatcacagaagaagagaaagatttggttcaaccggtgccttcgactttgccttcaagtgtgacagcaccaccagtatctgaacttgatgtcacccctacagccaagtacaggcacgagtactaccaaaagccagaggaagttgtggtaactgtttttgcaaaaggaatacccaagcagaatgttaacatcgactttggtgaacaaattctgagtgttgtgattgaggttcctggagaggatgcgtattatctccaaccgagattgtttggaaagataataccagataagtgcaaatatgaagtattgtcgaccaaaattgagatctgtcttgcaaaagccgatataatcacatgggcctccctcgaacacggcaaagggccagcggttttgccaaagcctaatgtctcatcagaggtttcacagaggccagcttatccatcttctaagaaagttaaggactgggacaagctggaagctgaagtgaagaagcaggaaaaagatgagaagctggaaggagacgcagctttgaacaaattcttccgggagatataccagaatgcggatgaggatatgaggcgagcgatgagcaaatcatttgtggaatcgaatgggacagtgctgtcaacaaactggcaagaggttgggactaagacaatcgagagtactcctccggatggcatggagctcaagaaatgggagatctgatctgatatgatatgatgatcctttcctttttatgcagttgtgaattttgcctaaatgtagacaaatcttgaaacctggtccctttcttcctgtaatgaggatcctaaggtttttgcttttttgttaaatatggctttctacctctgctatgttgtgacttgtgagttatattgtctttaggtctcaacttttttgtttttgtttttatttgagtattcataatttc

SEQ ID NO: 4 - protein, 350 aa, Arabidopsis thaliana
MAKELADKAKEAFVDDDFDVAVDLYSKAIDLDPNCAEFFADRAQAYIKLESFTEAVADANKAIELDPSLTKAYLRKGTACMKLEEYRTAKTALEKGASITPSESKFKKLIDECNFLITEEEKDLVQPVPSTLPSSVTAPPVSELDVTPTAKYRHEYYQKPEEVVVTVFAKGIPKQNVNIDFGEQILSVVIEVPGEDAYYLQPRLFGKIIPDKCKYEVLSTKIEICLAKADIITWASLEHGKGPAVLPKPNVSSEVSQRPAYPSSKKVKDWDKLEAEVKKQEKDEKLEGDAALNKFFREIYQNADEDMRRAMSKSFVESNGTVLSTNWQEVGTKTIESTPPDGMELKKWEI

SEQ ID NO: 5 - DNA, 1416 bp, Arabidopsis thaliana
aacatccaatctctctttatattccttccttccattgtggcaataagtaacaaaccttgccctctacttcattccctccttgttttgatttcatcgtctttgttagctctcctctgtttttttttcttagtcaatcgatggcgaaggagcttgctgataaggctaaagaggctttcgtagacgatgacttcgatgttgctgttgacttgtactccaaagccattgacttggatcctaattgcgctgagttcttcgctgatcgtgctcaggcctatatcaaactcgaaagcttcactgaggccgtggcagatgcgaacaaagcaattgagttggatccttcattgaccaaagcttacctaagaaaaggaactgcctgtatgaagcttgaagagtatcggactgctaaaacagctcttgaaaagggtgcctctatcacgccgagtgaatccaaatttaagaagttgatagatgaatgcaattttctaatcacagaagaagagaaagatttggttcaaccggtgccttcgactttgccttcaagtgtgacagcaccaccagtatctgaacttgatgtcacccctacagccaagtacaggcacgagtactaccaaaagccagaggaagttgtggtaactgtttttgcaaaaggaatacccaagcagaatgttaacatcgactttggtgaacaaattctgagtgttgtgattgaggttcctggagaggatgcgtattatctccaaccgagattgtttggaaagataataccagataagtgcaaatatgaagtattgtcgaccaaaattgagatctgtcttgcaaaagccgatataatcacatgggcctccctcgaacacggcaaagggccagcggttttgccaaagcctaatgtctcatcagaggtttcacagaggccagcttatccatcttctaagaaagttaaggactgggacaagctggaagctgaagtgaagaagcaggaaaaagatgagaagctggaaggagacgcagctttgaacaaattcttccgggagatataccagaatgcggatgaggatatgaggcgagcgatgagcaaatcatttgtggaatcgaatgggacagtgctgtcaacaaactggcaagaggttgggactaagacaatcgagagtactcctccggatggcatggagctcaagaaatgggagatctgatctgatatgatatgatgatcctttcctttttatgcagttgtgaattttgcctaaatgtagacaaatcttgaaacctggtccctttcttcctgtaatgaggatcctaaggtttttgcttttttgttaaatatggctttctacctctgctatgttgtgacttgtgagttatattgtctttaggtctcaacttttttgtttttgtttttatttgagtattcataatttc

SEQ ID NO: 6 - protein, 350 aa, Arabidopsis thaliana; identical to SEQ ID NO: 4

SEQ ID NO: 7 - DNA, 1456 bp, Arabidopsis thaliana
aaaacgttcttaaaagaaaaaaaaaatcccaaacacagcaaaaaaaaaaaaagcctagaggaatagaatcggtctctttctctataatctctctctctctctgacttgtttgtgttctctcaaatcctctgataagaatcaatggccaaggaattagcagagaaagctaaagaagcttttctagatgatgacttcgatgttgctgttgacttatactccaaagccattgacttggatcccaattgcgccgccttcttcgccgatcgtgctcaggccaacatcaaaatcgataacttcactgaagctgttgtagatgcgaacaaagccattgagttggagccaacgttggcaaaagcctatctcagaaagggcactgcttgtatgaagctagaagaatatagtactgctaaagcagccctggaaaagggagcttctgttgcaccgaatgaaccaaagtttaagaagatgatagatgaatgcgatcttcgtattgcagaagaagagaaagatttggttcagccgatgccaccgagtttgccttcaagctctacaacaccactagcaacggaagctgatgctcctcctgttccaattcctgcagcacctgccaaaccgatgttcaggcacgagttctaccagaaaccagaagaagcggtggtgacaattttcgccaaaaaagtacctaaggagaacgtaactgtcgagtttggtgagcagattctgagtgttgtcattgatgttgctggagaggaagcttatcatctccagccgagattgttcgggaagataataccagagaagtgcagatttgaagtattgtcgaccaaagttgagatccgtcttgcgaaagcagagataatcacctgggcctcccttgaatatggtaaagggcaaagtgttttgcccaaacccaatgtctcatcagcgctgtcgcagagaccagtgtacccatcttctaagccagcaaaagactgggacaagttggaagctgaagtgaagaaacaggagaaggatgagaagcttgatggagatgcagctatgaacaaatttttcagcgacatatactcgagtgcagatgaagacatgaggcgggcaatgaacaaatcatttgcagagtcgaatgggacggtactgtcgacaaactggaaagaagttgggactaagaaagtggagagcactccaccagatggcatggagctcaagaagtgggagtattgatcttcttaaaatccccttttctggtttttgttaaaaaaaagtctgacaaatcttttgaacttttaaggtgtttttcttttttggtttctgctcgaatttgtctctctccattcttgcgttgtggtctcaaagaacgttctgatactttgattttgtattagaaaactaaaactcgcaagtctgttgttttggaactttgttcttttatcgagaggcttatctaaatatttcttgacat

SEQ ID NO: 8 - protein, 358 aa, Arabidopsis thaliana
MAKELAEKAKEAFLDDDFDVAVDLYSKAIDLDPNCAAFFADRAQANIKIDNFTEAVVDANKAIELEPTLAKAYLRKGTACMKLEEYSTAKAALEKGASVAPNEPKFKKMIDECDLRIAEEEKDLVQPMPPSLPSSSTTPLATEADAPPVPIPAAPAKPMFRHEFYQKPEEAVVTIFAKKVPKENVTVEFGEQILSVVIDVAGEEAYHLQPRLFGKIIPEKCRFEVLSTKVEIRLAKAEIITWASLEYGKGQSVLPKPNVSSALSQRPVYPSSKPAKDWDKLEAEVKKQEKDEKLDGDAAMNKFFSDIYSSADEDMRRAMNKSFAESNGTVLSTNWKEVGTKKVESTPPDGMELKKWEY

SEQ ID NO: 9 - DNA, 1334 bp, Arabidopsis thaliana
tgatttcatcgtctttgttagctctcctctgtttttttttcttagtcaatcgatggcgaaggagcttgctgataaggctaaagaggctttcgtagacgatgacttcgatgttgctgttgacttgtactccaaagccattgacttggatcctaattgcgctgagttcttcgctgatcgtgctcaggcctatatcaaactcgaaagcttcactgcagaggccgtggcagatgcgaacaaagcaattgagttggatccttcattgaccaaagcttacctaagaaaaggaactgcctgtatgaagcttgaagagtatcggactgctaaaacagctcttgaaaagggtgcctctatcacgccgagtgaatccaaatttaagaagttgatagatgaatgcaattttctaatcacagaagaagagaaagatttggttcaaccggtgccttcgactttgccttcaagtgtgacagcaccaccagtatctgaacttgatgtcacccctacagccaagtacaggcacgagtactaccaaaagccagaggaagttgtggtaactgtttttgcaaaaggaatacccaagcagaatgttaacatcgactttggtgaacaaattctgagtgttgtgattgaggttcctggagaggatgcgtattatctccaaccgagattgtttggaaagataataccagataagtgcaaatatgaagtattgtcgaccaaaattgagatctgtcttgcaaaagccgatataatcacatgggcctccctcgaacacggcaaagggccagcggttttgccaaagcctaatgtctcatcagaggtttcacagaggccagcttatccatcttctaagaaagttaaggactgggacaagctggaagctgaagtgaagaagcaggaaaaagatgagaagctggaaggagacgcagctttgaacaaattcttccgggagatataccagaatgcggatgaggatatgaggcgagcgatgagcaaatcatttgtggaatcgaatgggacagtgctgtcaacaaactggcaagaggttgggactaagacaatcgagagtactcctccggatggcatggagctcaagaaatgggagatctgatctgatatgatatgatgatcctttcctttttatgcagttgtgaattttgcctaaatgtagacaaatcttgaaacctggtccctttcttcctgtaatgaggatcctaaggtttttgcttttttgttaaatatggctttctacctctgctatgttgtgacttgtgagttatattgtctttaggtctcaacttttttgtttttgtttttatttgagtattcataatttc

SEQ ID NO: 10 - protein, 351 aa, Arabidopsis thaliana
MAKELADKAKEAFVDDDFDVAVDLYSKAIDLDPNCAEFFADRAQAYIKLESFTAEAVADANKAIELDPSLTKAYLRKGTACMKLEEYRTAKTALEKGASITPSESKFKKLIDECNFLITEEEKDLVQPVPSTLPSSVTAPPVSELDVTPTAKYRHEYYQKPEEVVVTVFAKGIPKQNVNIDFGEQILSVVIEVPGEDAYYLQPRLFGKIIPDKCKYEVLSTKIEICLAKADIITWASLEHGKGPAVLPKPNVSSEVSQRPAYPSSKKVKDWDKLEAEVKKQEKDEKLEGDAALNKFFREIYQNADEDMRRAMSKSFVESNGTVLSTNWQEVGTKTIESTPPDGMELKKWEI

SEQ ID NO: 11 - DNA, 1284 bp, Brassica napus
caaatcctcaaaaagagtgattcaatggcgaaggaactggcggaaaaagctaaagaggcgttcttagatgacgacttcgatgtggctgttgacttatactccaaagccattgacttggatccctcttgcgcctccttcttcgccgatcgtgctcaggccaacatcaaactccttaacttcaccgaagctgttgcagatgccaacaaagccatcgagttggagcctactttggccaaagcttatctcagaaagggcactgcttgtatgaagctagaagagtatgctactgctaaagcagctcttgagaagggcgcttccgttgcacctaatgaatccaagtttgagaagatgatagatgaatgcaaccttctcattgcagaagaagagaaagatttggttcaacaggtgccaccgactttgccttcaagctctacaacaccactagcaatcgcagctgatgctcctcctgttccaagtcctgcaccacctgccaaacctatgttcaggcacgagttctaccagaagccagaggaggttgtggtgacaattttcgctaaaggaataccaaagcagaacgtgaatgtagagtttggtgaccagattctgagtgttgtgattgatgttgctggagaagaagcttatcatttccagccaagattgttcgggaagataataccagagaagtgcaggtatgaggtattgtcaaccaaagttgagatccgtctcgcaaaagcagagatagtcacttgggcctcccttgaatatggcaaagggcaagctcttctgcctaaacccaatgttgcatcagcagtgtctcagaggccggtgtacccatcctctaagccgggaaaagactgggacaagctggaagctgaagtgaagaaacaggagaaggatgagaagctagatggagatgcagctatgaacaagtttttcagcgacatataccagagtgcagatgaggacatgaggcgagccatgaacaaatcatttgcagagtcaaatgggacggtgctgtctacgaactggaaagaggttgggacaaagaaagtggagagcactccaccagatggcatggagctgaagaagtgggagtattgatgatctttttaaatccttttatctggtcttttcaaaaatctctgacaaatctttaaagttccattggtttttcaagtttgggtctgagaaaacgagtgtgctagaaaaccgcgcaagtttgtgctttgtaccttttcttctccctcgagagagggcttcgaatgacattcttgcattgttatc

SEQ ID NO: 12 - protein, 358 aa, Brassica napus
MAKELAEKAKEAFLDDDFDVAVDLYSKAIDLDPSCASFFADRAQANIKLLNFTEAVADANKAIELEPTLAKAYLRKGTACMKLEEYATAKAALEKGASVAPNESKFEKMIDECNLLIAEEEKDLVQQVPPTLPSSSTTPLAIAADAPPVPSPAPPAKPMFRHEFYQKPEEVVVTIFAKGIPKQNVNVEFGDQILSVVIDVAGEEAYHFQPRLFGKIIPEKCRYEVLSTKVEIRLAKAEIVTWASLEYGKGQALLPKPNVASAVSQRPVYPSSKPGKDWDKLEAEVKKQEKDEKLDGDAAMNKFFSDIYQSADEDMRRAMNKSFAESNGTVLSTNWKEVGTKKVESTPPDGMELKKWEY

SEQ ID NO: 13 - DNA, 1458 bp, Glycine max
gaattcggcaccagatcattcattcctattccttctttctcttccaattccaaatcacaacccttcgttttccctctctagaatcttcttctccattcaattcctactccttttttcctctctgtccctctctctctccctctctcatggcttccgatctcgaagcaaaagccaaagaggccttcgtcgaagaccacttcgaactcgccgtggaccttctctctcaggccattcatctcgaacccaacaaagccgaattctacgccgaccgcgcccaagccaacatcaaactcaacaacttcactgaggctgtggctgatgctaacaaagcaattgaattgaatccttctctaccaaaagcatatttgcggaaaggtactgcttgcatgaagcttgaggaatatgaaactgcaaaggctgctctggaggtgggtgcatcattgtctccagacaactcaaggtttgctactttgatcaaagaatgtgataagctcattgcagaagaatcttataccccacctattatagaggaaaagaccacaacagaggatgctactccaaaagatgttcagcaacaagatgatcttctagagaagccaacagttacagtgactaaacctaaatataggcatgaattctaccagaaacatgatcagttggttgtgaccatatttgcaaagaaaatcccaaaggaaagcattactgttgacttcggtgaacaaatactaagtgttagtattaatgtccctggagaagacacatatgcttttcaacctcgcttatttggaaagatcataccttccaattgccaatatgaagttttgtccaccaaaattgaaattcgtcttgcaaaagcagaacctattcactggacatctctagaattcaccagagacatcgttgttcaacagagggttaatgcttcttcagttactggaagtcaaagaccttcttacccatcctcaaaacaaacaagagattgggacaagattgaagctcaagtcaagaaagaggagaaagatgaaaagcttgatggcgatgctgcgttgaacaaatttttccgtgaaatatatcaagatgcagatgaggatacaaggagggcaatgaaaaagtcttttgttgagtctaatgggacagtgctgtctacaaactggaaagaagtgggatcaaagaaggtagagggaagtgctcctgatggcatggagttgaagaaatgggaatattaagacattttctggatcaatgttatacatattttggtgtgagattatactttggtttgtttttgttggttagcttaactgctgaactaaagatacttattttctttaattttttatttattttcatgaggtgtgtccgtcttcgctaggacctgaattcatggttgttggttgagaggacaaggctgttgtctttggtgaatatattgcaactttctgttgtaaaaaaaaaaaa

SEQ ID NO: 14 - protein, 359 aa, Glycine max
MASDLEAKAKEAFVEDHFELAVDLLSQAIHLEPNKAEFYADRAQANIKLNNFTEAVADANKAIELNPSLPKAYLRKGTACMKLEEYETAKAALEVGASLSPDNSRFATLIKECDKLIAEESYTPPIIEEKTTTEDATPKDVQQQDDLLEKPTVTVTKPKYRHEFYQKHDQLVVTIFAKKIPKESITVDFGEQILSVSINVPGEDTYAFQPRLFGKIIPSNCQYEVLSTKIEIRLAKAEPIHWTSLEFTRDIVVQQRVNASSVTGSQRPSYPSSKQTRDWDKIEAQVKKEEKDEKLDGDAALNKFFREIYQDADEDTRRAMKKSFVESNGTVLSTNWKEVGSKKVEGSAPDGMELKKWEY

SEQ ID NO: 15 - DNA, 2351 bp, Hordeum vulgare
atttcggtacgaggcaggatttgtcctcctccacccagccgccaagccttctcgaagcttccccggcccgcccccgatccgatcggaccgcctgccatggccgacgaggcgaaggccaaaggtaatgcggccttctcggccggccgcttcgaggaggcggcggggcacttctccgacgccatcgcgctcgccccggccaaccacgtgctctactccaaccgctcggcggcgctcgcctcgatccaccgctactccgacgcgctcgccgacgccgagaagaccgtcgagctcaagcccgactgggccaagggctactcgcgcctcggcgccgcacacctcggcctcggcgacgcggccagcgccgccgccgcctacgagaagggcctcgccctcgatcccagcaacgagggcctcaaggccggcctcgctgacgccaagaaggctgcggccgccccgccgcggcgcccgccttctggcggcgccgacgcgatcggccagatgttccagggccccgagctctggaccaagatcgcttccgaccccgctacgcgcgcctacctcgaccagccggatttcatgcagatgctgcgggacgtgcagcgggatcccagcagtctcaacatgttcctatccgacccgcgcatgatgcaggtgctcagcctcatgcttaacatcaagatccagacgccccaggactccgattttccgcagtcctcctcgccgtcgcagccaccaccgcagcagcagaggcaacagcccgagacaaaggcgagggagatggagcctgagccacagccggagcccatggaggtgtctgatgaggacaaggagaagaaggagaggaaagctgctgctctgaaggagaaggaggcagggaatgcatcgtacaagaagaaggacttcgagacggcgatccagcattacacaaaggccatggaacttgatgacgaggacatctcctacctcactaaccgagcagcggtgtacatcgaaatggggaagtttgatgagtgcattgcggactgtgataaagctgtggagaggggaagggaacttcgtgctgatttcaagatggttgctagggcactaacaagaaaaggaactgctctggccaaacttgctaagaactccaaggactatgatattgccattgagactttccagaaggctctaactgagcaccggaatccagacactcttaaaaggttaaatgaggctgagaaggcaaagaaagatttggagcaacaagagtattatgacccaaagatagctgatgaggagagggagaaaggtaatgagatgttcaagcagcagaagtatccagaagcaataaagcattacaatgaggctatcaggaggaacccgaaggatgctagggtatacagcaatagagctgcatgctataccaagctgggagccatgcctgaaggtcttaaagacgcagagaagtgtattgagctagacccaaccttctccaaagggtatacaaggaagggtgcagttcagttttttatgaaggaatatgagaaggcaatggaaacttaccaggctgggttaaagcttgaccctaataaccaggaactgcttgatggcataaggaggtgtgttcagcagatcaacaaggctaacaggggtgacataagtcaggaggatttgcaggagaaacagagtaaagctatgcaggacccagaaatccagaacatccttaccgatcctatcatgcgacaggtgttgatggatttccaggagaaccctagggctgctcaggatcatctgaaggaccctggagtggcacagaagatccaaaagctcataaacgctggaatagtccaaacgagatgatcaagcaagggcgtttgtgttgagattgtgctcggttgtgtcgtcactgtacactgcttctctgcccagcgtgaacttcttttgtatgccatggggcatccatttcagttggatttgtgagtacagcctgccacatcgttattcctgtgtacggctattatgttacagttctatgtgggcaatgtcccatatattattagttgtagccgttttcgccttcacagtggacaaacagatgctagaacaagaacagtagaatgttattgtattttatttcttgctgtgctagggaaatgctgtcaatggagaaaattcattgaaaaaaaaaaaaaaaaaaaaaattcaggggggggccccgggacccaatattgcctttaatggagtgggatttcaaattcatgggccggcgttttacaaacggggggattgggaaaaaccctgggcggtcccaaaatttatttgcttgtggaaaattaccccttttttccaatggggggtaaaagcaaaaa

SEQ ID NO: 16 - protein, 581 aa, Hordeum vulgare
MADEAKAKGNAAFSAGRFEEAAGHFSDAIALAPANHVLYSNRSAALASIHRYSDALADAEKTVELKPDWAKGYSRLGAAHLGLGDAASAAAAYEKGLALDPSNEGLKAGLADAKKAAAAPPRRPPSGGADAIGQMFQGPELWTKIASDPATRAYLDQPDFMQMLRDVQRDPSSLNMFLSDPRMMQVLSLMLNIKIQTPQDSDFPQSSSPSQPPPQQQRQQPETKAREMEPEPQPEPMEVSDEDKEKKERKAAALKEKEAGNASYKKKDFETAIQHYTKAMELDDEDISYLTNRAAVYIEMGKFDECIADCDKAVERGRELRADFKMVARALTRKGTALAKLAKNSKDYDIAIETFQKALTEHRNPDTLKRLNEAEKAKKDLEQQEYYDPKIADEEREKGNEMFKQQKYPEAIKHYNEAIRRNPKDARVYSNRAACYTKLGAMPEGLKDAEKCIELDPTFSKGYTRKGAVQFFMKEYEKAMETYQAGLKLDPNNQELLDGIRRCVQQINKANRGDISQEDLQEKQSKAMQDPEIQNILTDPIMRQVLMDFQENPRAAQDHLKDPGVAQKIQKLINAGIVQTR

SEQ ID NO: 17 - DNA, 1125 bp, Medicago vulgare
atggcgcaagaactcgaaaacaaagccaaagaagcttttttcgacgacgattttacactcgccgttgatttctattctcaagccatcgaaatcgatcccaccaacgctaatctctttgccgatcgagcacaatcgcatatcaaactcaacgctttcactgaagctgtttctgatgctaataaggctattcaattgaaccctaatttgtctaaagcttatcttcgcaaagggactgcttgtattaatcttgaagaatatcatactgctaaggttgcacttgaaaagggggcttcttttgcacctgatgattccagattcactaatttgattcaacaatgtcaacgcttcattgctgctgaggaatctgaaagtcttacgagcaccctaccaccaaatggacccaaatcatctgttgcgtctgttgatgatacccatatgtgtgataagagtgatgaaacatccaaagaacctcaaagagacagtcctgcatcccaaacaaatgcagttgcaccagtcagaccaaaatacaggcatgaatattaccagaagccagaagaagtggttgtgacaatatttgcaaaagggataccagcagaaaatgttgttgtggacttcggcgaacagattctgagtgttaccattgatgttcctggccaagatgcctaccattaccaacctagattgtttggaaagataatacctgataagtgcaaagttgtggttttgtcaaccaaaattgagattcgtctggcaaaagctgaagcagttaattggacatctctggaatatagcaaggatgtgcttccccaaaagataatcgtgccctcagttcaatctgaaaggcctgcatatccgtcatcaaagtcaaggactaaggattgggataagttggaagctgaagtgaaaaaagaggagaaagaagaaaagcttgatggtgatgctgctttgaataaattgttccgtgatatttaccaaaatgcagacgaggacatgaggagagcgatgagcaagtcttttctggagtcaaatggaacagtgctttcaactgattggaaagaagtgggatcaaagaaggtggaaggaagtcctccggaaggcatggaggtgaagaaatgggagtattga

SEQ ID NO: 18 - protein, 374 aa, Medicago vulgare
MAQELENKAKEAFFDDDFTLAVDFYSQAIEIDPTNANLFADRAQSHIKLNAFTEAVSDANKAIQLNPNLSKAYLRKGTACINLEEYHTAKVALEKGASFAPDDSRFTNLIQQCQRFIAAEESESLTSTLPPNGPKSSVASVDDTHMCDKSDETSKEPQRDSPASQTNAVAPVRPKYRHEYYQKPEEVVVTIFAKGIPAENVVVDFGEQILSVTIDVPGQDAYHYQPRLFGKIIPDKCKVVVLSTKIEIRLAKAEAVNWTSLEYSKDVLPQKIIVPSVQSERPAYPSSKSRTKDWDKLEAEVKKEEKEEKLDGDAALNKLFRDIYQNADEDMRRAMSKSFLESNGTVLSTDWKEVGSKKVEGSPPEGMEVKKWEY

SEQ ID NO: 19 - DNA, 1518 bp, Oryza sativa
ctacccctccgcgaagtcttcgtctggtcttcccccacccgcatcccccggcctcctcaccgcagccgcaaaagccaagccgccatggcaaccgccgccgcgtcggatctggagagcaaggccaaggcggccttcgtcgacgacgacttcgagctcgccgccgagctctacacgcaggcaatcgaggccagccccgccaccgccgagctctacgccgaccgcgcccaggcccatatcaagctaggcaactacactgaggctgtagctgatgctaacaaggccattgaacttgacccatcaatgcacaaggcttatcttcgtaaaggcgctgcatgtatacgactggaggagtatcaaactgcaaaagcagctcttgaattgggttactcgttcgcatctggtgactcaaggtttactcgcctaatgaaggagtgtgatgagcgcattgctgaggagcttagtgaagtccctgttaagaaggctgaagatggagcagctgccccctctgttgcttcttttgttgaggaaaaggatgatgctgcaaacatggataatacaccaccaatggtagaagtgaagccaaaatacaggcacgacttctacaacagtgctacagaagttgtattgacaatttttgcaaagggtgttcctgctgagaatgttgttgttgattttggtgaacaaatgttaagtgtgtcgattgaagtccctggagaggagccgtaccattttcagcctcgtctgttttctaagatcatccctgagaaaagcagataccaagtgctatccacgaaggttgaaataagactggctaaagctgaacagattacatggacctcacttgattatgataaaaaaccaaaggctgttccacaaaagataatccctccagctgaatcggcccagaggccatcatatccttcctcaaaatccaagaaagactgggataaactggaagctgaagttaaaaaggaggagaaggaggagaagcttgaaggcgatgctgcattgaacaaatttttccgtgacatctacagtgatgctgatgaagacatgcgacgagcaatgatgaaatcttttgttgaatctaacggtactgttctgtcgaccaattggaaagatgttggctcgaagaaggtagagggaagcccacctgatgggatggagcttaagaaatgggagtactaagatctcggttcgtgcatgctgtaaattcgttatcgtcgtgagtcatcacttggctggagatttcgcgcatcattgtcaagttggattttgtgtgatgctcttcgttgcgtttccatattgtaagctctctgtgtgacaggctagcttgtctaagactttatcctagttttggaagatacatctggacacaagaatacgttatctgaatctttgctccgaagtgcagaatgctctgtcgttttactaatattgcaaagtagtgctgtatctcctatcatccctgaaatgcgatgttcgtcttaattgtagcctctacaatgctcacagtta

SEQ ID NO: 20 - protein, 367 aa, Oryza sativa
MATAAASDLESKAKAAFVDDDFELAAELYTQAIEASPATAELYADRAQAHIKLGNYTEAVADANKAIELDPSMHKAYLRKGAACIRLEEYQTAKAALELGYSFASGDSRFTRLMKECDERIAEELSEVPVKKAEDGAAAPSVASFVEEKDDAANMDNTPPMVEVKPKYRHDFYNSATEVVLTIFAKGVPAENVVVDFGEQMLSVSIEVPGEEPYHFQPRLFSKIIPEKSRYQVLSTKVEIRLAKAEQITWTSLDYDKKPKAVPQKIIPPAESAQRPSYPSSKSKKDWDKLEAEVKKEEKEEKLEGDAALNKFFRDIYSDADEDMRRAMMKSFVESNGTVLSTNWKDVGSKKVEGSPPDGMELKKWEY

SEQ ID NO: 21 - DNA, 281 bp, Populus trichocarpa
tctcgaatcgatttttgttgaattcaatcgatggcggatctggagaagaaagccaaagaagcattcatcgacgatcacttcgagttagccgtcgatctctacacccaagccatcgctcttaaccctaccaatcctgacctcctcgctgaccgtgctcaggccaatatcaaactcaacagtctcaccggtatgcttaactaaccctcgctccaccaccaccacaacatcaacccctctctctcctttatatcgcttcactttctctcgcttgctctctgttt

SEQ ID NO: 22 - protein, 56 aa, Populus trichocarpa
MADLEKKAKEAFIDDHFELAVDLYTQAIALNPTNPDLLADRAQANIKLNSLTGMLN

SEQ ID NO: 23 - DNA, 1190 bp, Populus trichocarpa
tctgtatttcttggttgttgaaaagaatcaatggcggatctggagaggaaagcgaaagaagcattcatcgatgaccacttcgagctagccgtagatctctacacgcaagccatcgcgcttaaccctaccaatcctgacctcttcgccgaccgcgcgcaagccaatatcaaactcaacaatttcaccgaggctgttgcggatgctagcagagcaattgcgttggatgcctccttggctaaagcttacttgcggaaaggtattgcatgtatgaaacttgaggaatatcagactgctaaggcagcattggaagtaggcgcgtctttggcaccgggagagtctagattcactaacttgatcaaggaatgtgacgagtgcatcgcagaggaaactggtgggtcgaaaaatcatgcagcagatgccccagttaacactgtttccatagaagatgtcgagccagaagacacttctagtcaggctccaatggtaataccttccaagccaaagtacaggcatgaattctaccaaaagccagaagaggtggttgtgagtatatttgcaaagggcgtacaagccagttggattagtgttgattttggtgaacagattctaagtgttaggattgaggttcctggtgaagatgggtatcattttcaacctcgcttatttgggaagataatacccgacaagtgcaagtataacatcttgtccaccaaagttgaatttcgacttgcaaaagctgaaccaggtctgcactgggcatctcttgaatacaacaaggagacagcagtagtacaaaggattgctgtatcctctgaaattgttcaaaagcctacctattcctcatcaaaaccaaaacgagttgattgggacaagattgaagctcaagtaaagaaggaggagaaagaagagaagctagatggggatgcagctttgaacaaatttttccgagaaatttatcaagatgctgatgaagacacaagaagagccatgaaaaaatcttttgtggagtccaacggcacggtgctgtcgacaaactggaaagaagtgggtacgaagaaggtggaaggaagccctcctgatgggatggagatgaggaaatgggagtactgagcttgtgttttggtaatggggaatgcgctgtaaagaacataacagttagattttgttccctgaatgatgattgtggttgt

SEQ ID NO: 24 - protein, 359 aa, Populus trichocarpa
MADLERKAKEAFIDDHFELAVDLYTQAIALNPTNPDLFADRAQANIKLNNFTEAVADASRAIALDASLAKAYLRKGIACMKLEEYQTAKAALEVGASLAPGESRFTNLIKECDECIAEETGGSKNHAADAPVNTVSIEDVEPEDTSSQAPMVIPSKPKYRHEFYQKPEEVVVSIFAKGVQASWISVDFGEQILSVRIEVPGEDGYHFQPRLFGKIIPDKCKYNILSTKVEFRLAKAEPGLHWASLEYNKETAVVQRIAVSSEIVQKPTYSSSKPKRVDWDKIEAQVKKEEKEEKLDGDAALNKFFREIYQDADEDTRRAMKKSFVESNGTVLSTNWKEVGTKKVEGSPPDGMEMRKWEY

SEQ ID NO: 25 - DNA, 1407 bp, Solanum lycopersicum
ccaattgccatttcactcttgttctagatacttctttggagttcctctccatcaccaatggcgtccgatctggagactagggctaaagaggcattcattgacgaccactttgaactcgccgttgacctgtacactcaagccataacgctgagccctaagaaccctgaacttttcgccgaccgtgctcaggccaatatcaaactcaactacttcactgaagctgttgttgatgcgaacaaggccattgagttggatcctacaatgtcaaaagcatatttacgcaaggggttggcctgtatgaagcttgaagaataccaaactgcaaaggcagctttggaaattggtgccagtttagcaccaggagagttaagattcagtaagctaatgaaagaatgtgatgaacatattgcagaggaagctggcgaattgcctaatctgtcggtggataaaacctcagctagtgttgttgcacatcctgcatctgagttaccggacaatgttgctattgcgcctgaaggtgctcaaccaacggtcaaccagtcccatcaaggatctgctgccaaaccaaaatacagacatgaattttatcagaaaccagaggaggtggtggtgactatatttgccaagggcataccagccaagaatgttgttgttgactttggtgaacaaatacttagtgttagcattgatgtgccaggtgaagaaacttattctttccagcctaggttgtttggcaagataacacctgcaaaatgcagatacgaagtgatgtctaccataattgagatccgccttgcgaaagctgagctgttacactggacatcgcttgagtatacaacggaacctgttgtaattcagaggcctattgtgtcatcagctgccccgcggcccagttatccttcctcaaaactgagaaatgtagattgggataaactagaagctgaagtgaaaaaagaggaaaaagatgaaaaattggatggagatgcagcattgaacaaatttttcagagacatttaccaagatgctgacgaggacactagaagagctatgatgaaatcctttgtggaatctaatgggactgttttgtcgacaaactggaaagaagttggcacaaagaaggttgaaggaagccctccggatggcatggagctgaagaaatgggagatctagaatcgatcctctgttgatgttttttgactttgcattttaagttgtttcattgctatttttattatagaagaatttgttcatattttcttttctaaggttttaagttttgttctttgctgttggattgagataacagtaatatatcttcaaattgtggacaaagcaaaaaaaaaaaaaaaaaaaaaaaaaaaaaacatgtcggccgcctcggccctcgaggcatctatgtcgggtgcg

SEQ ID NO: 26 - protein, 370 aa, Solanum lycopersicum
MASDLETRAKEAFIDDHFELAVDLYTQAITLSPKNPELFADRAQANIKLNYFTEAVVDANKAIELDPTMSKAYLRKGLACMKLEEYQTAKAALEIGASLAPGELRFSKLMKECDEHIAEEAGELPNLSVDKTSASVVAHPASELPDNVAIAPEGAQPTVNQSHQGSAAKPKYRHEFYQKPEEVVVTIFAKGIPAKNVVVDFGEQILSVSIDVPGEETYSFQPRLFGKITPAKCRYEVMSTIIEIRLAKAELLHWTSLEYTTEPVVIQRPIVSSAAPRPSYPSSKLRNVDWDKLEAEVKKEEKDEKLDGDAALNKFFRDIYQDADEDTRRAMMKSFVESNGTVLSTNWKEVGTKKVEGSPPDGMELKKWEI

SEQ ID NO: 27 - DNA, 1110 bp, Solanum lycopersicum
atggcgtccgatctggagactagggctaaagaagctttcatcgatgaccactttgagctcgccgttgacctttacactcaagccatagccatgacccctaagaacgctgagcttttcgccgaccgtgctcaggccaatatcaaactcaactacttcactgaagctgttgttgatgcgaacaaggccattgagttagatccttcaatgtcaaaagcatatttgcgtaaggggttggcctgtatgaagcttgaagagtaccaaactgcaaaagcagctttgcaaactggtgctagtttagcaccggcagagtcaaggttcacaaagttaatcaaagaatgtgatgaacgcattgcagaggaagctggagaactacctaatcagtcagtggataaaacctcgggaaatgtcgttacggctccccctgagtctttggacaatgttgctgttgcgcctaaagatgctcaaccatctgtcaacctgtcctatcaaggatctgctgccagaccaaaatacaggcatgaattttaccagaagccagaggaggtggtggtgactatatttgccaagggtataccagccaagaatgttgttgttgactttggtgaacaaatacttagtgttagcattgatgtgccgggcgaggaagcttattctttccagcctaggttgtttgggaagataacacctgcaaaatgcagatacgaagtgatgtctaccaaaattgagatccgccttgcaaaagctgaacccttacactggacatctctcgaatatacgagggagcctgctgtagtgcagaggcctaatgtgtcatcagatgccccccggcccagttatccttcctcgaaattgagacatgtggattgggataaattagaggctgaagtgaaaaaggaggaaaaagacgaaaaattggatggagatgcagcattgaacaaatttttccgagacatttacaaagacgccgatgaggacaccagaagagccatgatgaaatcctttgtggaatctaatgggactgttctttccacaaactggaaagaagtcggtgcaaagaaggtcgaaggaagccctccagatggcatggagctgaagaaatgggagatctag

SEQ ID NO: 28 - protein, 369 aa, Solanum lycopersicum
MASDLETRAKEAFIDDHFELAVDLYTQAIAMTPKNAELFADRAQANIKLNYFTEAVVDANKAIELDPSMSKAYLRKGLACMKLEEYQTAKAALQTGASLAPAESRFTKLIKECDERIAEEAGELPNQSVDKTSGNVVTAPPESLDNVAVAPKDAQPSVNLSYQGSAARPKYRHEFYQKPEEVVVTIFAKGIPAKNVVVDFGEQILSVSIDVPGEEAYSFQPRLFGKITPAKCRYEVMSTKIEIRLAKAEPLHWTSLEYTREPAVVQRPNVSSDAPRPSYPSSKLRHVDWDKLEAEVKKEEKDEKLDGDAALNKFFRDIYKDADEDTRRAMMKSFVESNGTVLSTNWKEVGAKKVEGSPPDGMELKKWEI

SEQ ID NO: 29 - DNA, 491 bp, Solanum lycopersicum
atcccttttccctctcttgttcaagaaacttcttctcatctgatccatggcgtccgatctcgtaactaaagctaaagaagcattcatcgacgaccactttgagctcgccgttgacctctactctcaagccattgctattactcctaataatgccgacctttttgctgaccgtgctcaggccaatatcaaactccgtaaattcactggtaacttatttgttaatatggtccctttgcattctcggtaacaaggacaaacaaatgcatactctgttttttgttttttcttttggttgcgtaaacaaatggatatctatggcatgcatttgttccatagtatttttgtgattgtgattaattttgagcagaagctttttctgattttaacaaggcgattgagttagatccgtcaacggcaaaagcatatatgcgcaaggggtgagtatatcaatcatttctattggtatgcttctttgtgacgatgacgttatc

SEQ ID NO: 30 - protein, 66 aa, Solanum lycopersicum
MASDLVTKAKEAFIDDHFELAVDLYSQAIAITPNNADLFADRAQANIKLRKFTGNLFVNMVPLHSR

SEQ ID NO: 31 - DNA, 1104 bp, Triticum aestivum
  misc_feature (19)..(19): n is a, c, g, or t
  misc_feature (24)..(24): n is a, c, g, or t
cccacgcgtgccgaagctnacctncggaagggctctgcttgcatcaagctggaggaataccaaactgcaaaggctgctcttgaagtgggttcttcttatgcatctggtgactcgaggtttactcgtctgatgaaggagtgtgatgatcgtattgctgaggagggctagccaggtgccagtaaagaatgccgctgcggctgttgcttcagctacatcttcgggggcatcttccggggctacaactgtggctactgaagctgaggaccaggatggtgcaaatatggagaatgcacagccaacggtggaagtgccaagcaagcccaaatacaggcatgactactacaatactcctacagaagtggtactgactatatttgctaagggtgttccagctgacagcgtggttgttgactttggtgaacagatgctgagtgtctcaattgaacttcccggtgaggaaccataccattttcagcctcgtctgttttcaaagatcgtcccagataagtgcaagtatactgtgttgtctacaaaggttgaaatgcgccttgcaaaagctgagccagtaacttggacatcattggattatactggtaaaccaaaggctcctcagaagataaatgtaccagctgaatcagcccagaggccatcttatccatcatcaaaatccaaaaaggactgggataagcttgaagctgaagtgaaaaaacaggagaaggatgaaaaacttgatggcgatgctgcattgaacaaatttttccgtgaaatttacagtgatgctgatgaagatatgcgtagagcaatgatgaagtcttttgtggagtctaatggaaccgttctctcaaccaactggaaggatgtcgggaaaaagacggttgaaggaagccctcctgatggaatggagctcaagaagtgggagtattaatgaatccagatcatccatgttgtaaatcctggtcgggtcgtgagtgttaacttggttgcagacttgcaaatcttggcgccggatttttggggtgggcctgaatcgttcccatattgaacccgttggcttcggggtactcttaggtcctttctcaatttcggaccaaagggggaaaaaaa

SEQ ID NO: 32 - protein, 260 aa, Triticum aestivum
MIVLLRRASQVPVKNAAAAVASATSSGASSGATTVATEAEDQDGANMENAQPTVEVPSKPKYRHDYYNTPTEVVLTIFAKGVPADSVVVDFGEQMLSVSIELPGEEPYHFQPRLFSKIVPDKCKYTVLSTKVEMRLAKAEPVTWTSLDYTGKPKAPQKINVPAESAQRPSYPSSKSKKDWDKLEAEVKKQEKDEKLDGDAALNKFFREIYSDADEDMRRAMMKSFVESNGTVLSTNWKDVGKKTVEGSPPDGMELKKWEY

SEQ ID NO: 33 - DNA, 1444 bp, Zea mays
ctcgattattctgtttgctctcgttcaagtcatcgtctggtcgcgtcggcagcagacgcccagagccggagggagcgccatggccgcgtcggatctggagagcaaagccaaggaggccttcgtcgacgacgacttcgagctggccgccgaactctacacgcaggccatcgacgccgggcccgccactgccgatctctacgccgaccgcgcccaggcgcacatcaagctcggcaactacactgaggctgtggcagatgctaacaaagcaattggtcttgatcctacaatgcataaagcctactaccggaaaggtgctgcatgcattaagcttgaagaataccaaactgcaaaggctgctcttgagttaggttcttcctatgcaccaggcgattcaaggtttacccgtctattgaaggaatgtgatgagtgcattgctgaggaatctagccaggcaccagcaaagaatgtcgaggctcctgtagctgctactgttgaggacaaggaggatgtcgcaaatatggataatacaccgccagtggtagaacccccaagcaaacctaaatataggcatgactactacaacagtgccacagaagtggtcctcacaatatatgctaagggtgttcctgctgatagtgtagtcattgattttggtgatcagatgttgagtgtatccattgaagtacctggtgaagaaccgtaccattttcagccccgtctgttttctaagattatccctgagaaatgcaagtatcaagttttatccaccaaggtcgaaatacgccttgcaaaagctgagcaggtgacatggacaaccctggattatagtggaagaccaaaggctattccccagaagataagcacgccagctgaaacagccccaagaccttcatacccatcttcaaagtcaaaaaaggactgggataaactggaagctgaagtaaaaaaggaggagaaggaagaaaaacttgaaggtgatgctgcattgaacaagttcttccgtgatatctacaaggatgctgatgaagatatgcggagggccatggacaagtcattcagggaatctaatggtaccgttctctcaaccaattggaaagatgttggatcaaagacggtggaagcgagccctcctgatggtatggagctcaagaagtgggaaatttgaagtttggactgcccctcttgtaaatccaggtcttggaagttatgacctagttctgtccacccatttggtgtcgtaagtttggttaagtgtgtgtgtgtttttggttcagctgtcgttcgaggaaaagctattgtaagttgtggactgtgtaaaagctgcaatagattgtgggttgtgaaaaaggtgtatgctgtttaatttaaacaagcataaaacttaaaaaaaaaaaaaaaaaaaaaaaaaaaaaaaaaaaaaaaaaggggggggggaaaaaaaaaa

SEQ ID NO: 34 - protein, 361 aa, Zea mays
MAASDLESKAKEAFVDDDFELAAELYTQAIDAGPATADLYADRAQAHIKLGNYTEAVADANKAIGLDPTMHKAYYRKGAACIKLEEYQTAKAALELGSSYAPGDSRFTRLLKECDECIAEESSQAPAKNVEAPVAATVEDKEDVANMDNTPPVVEPPSKPKYRHDYYNSATEVVLTIYAKGVPADSVVIDFGDQMLSVSIEVPGEEPYHFQPRLFSKIIPEKCKYQVLSTKVEIRLAKAEQVTWTTLDYSGRPKAIPQKISTPAETAPRPSYPSSKSKKDWDKLEAEVKKEEKEEKLEGDAALNKFFRDIYKDADEDMRRAMDKSFRESNGTVLSTNWKDVGSKTVEASPPDGMELKKWEI

SEQ ID NO: 35 - DNA, 1446 bp, Zea mays
ttcgattattctgttcgctctcgcccaagtcatcgtctggtcgtcgcccgcagaggcgcagacgcccaaaaccggaaggggcgccatggccgcgtcggatctggagagcaaggccaaggaggccttcgtcgacgacgacttcgagctggccaccgagctctacagccaggccatcgacgccgggcccgccaccgccgacctctatgccgaccgcgcccaggcgcacatcaagctcggcaactacactgaggctgtggcggatgctaacaaagcaattgagcttgatcctatgatgcataaagcttactaccggaaaggtgctgcatgcattaagcttgaagaataccaaactgcaaaggctgctcttgagttgggttcttcttatgcatcaggcgattcaaggtttgctcgtctattgaaggaatgtgatgagcgcatcgctgaggaatctagccaggcaccagtaaagaatgttgaggctactgtggctgctactattgaggacaaggaggatttcacaaatatggagaatacaccaccagtgatagaacccccaagcaaaccaaaatacaggcatgactactacaacagtgccacagaagtggtactgacaatatttgctaagggtgttcctgctgatagtgtagtcattgattttggtgaacagatgttgagtgtatccattgaagttcctggtgaagaaccataccattttcagccccgtctgttttctaagattatccctgagaaatgcaaatatcaagtcttatccaccaaggttgaaatacgccttgcaaaagctgagcaggtgacatggacaaccctggattatagtggaagaccaaagactgttccccagaagataagcacgccagctgaaacagccccaagaccttcatacccatcttcaaaggcgaaaaaagactgggataaactggaagctgaagtcaaaaaggaggagaaggaagaaaaacttgatggtgatgctgcattgaacaaattcttccgtgacatctacaaggatgctgatgaagatatgcggagggccatgatgaagtcattcgtggaatcaaatggcactgttctctcaaccaattggaaagatgttggagcaaagaaggtagaagggagcccccctgatggtatggagctcaagaagtgggaatactaaagtttggactgcccatcttttgtaaatccaggtcttggaaactatgacctaattccgtccacccatagtgccatgagcttgcttggttaagtctctgcttttgtaagctttctgtatgacagtctagcgtgtgtctgagtgctacttgccgtagcttttgatggacataggtatgctattatgtggtatcgaccgggaaccatctgtggtatcaaagacagcaaactataatgtatggaatgcctattctttttggtcgaaaaaaaaaaaaaaaa

SEQ ID NO: 36 - protein, 361 aa, Zea mays
MAASDLESKAKEAFVDDDFELATELYSQAIDAGPATADLYADRAQAHIKLGNYTEAVADANKAIELDPMMHKAYYRKGAACIKLEEYQTAKAALELGSSYASGDSRFARLLKECDERIAEESSQAPVKNVEATVAATIEDKEDFTNMENTPPVIEPPSKPKYRHDYYNSATEVVLTIFAKGVPADSVVIDFGEQMLSVSIEVPGEEPYHFQPRLFSKIIPEKCKYQVLSTKVEIRLAKAEQVTWTTLDYSGRPKTVPQKISTPAETAPRPSYPSSKAKKDWDKLEAEVKKEEKEEKLDGDAALNKFFRDIYKDADEDMRRAMMKSFVESNGTVLSTNWKDVGAKKVEGSPPDGMELKKWEY

SEQ ID NO: 37 - protein, 34 aa, Artificial sequence
  TPR1
SKAYLRKGLACMKLEEYQTAKAALETGASLAPGE

SEQ ID NO: 38 - protein, 34 aa, Artificial sequence
  TPR2a
ASDLETRAKEAFIDDHFELAVDLYTQAISLSPKN

SEQ ID NO: 39 - protein, 34 aa, Artificial sequence
  TPR2b
PELFADRAQANIKLNYFTEAVVDANKAIELDPYM

SEQ ID NO: 40 - protein, 77 aa, Artificial sequence
  CS domain
YRHEFYQKPEEVVVTIFAKGIPAKNVVVDFGEQILSVSIDLPGGETYSFQPRLFGKITPAKCRYEVMSTKIEIRLAK

SEQ ID NO: 41 - protein, 82 aa, Artificial sequence
  SGS domain
NVDWDKLEAQVKKEEKDEKLDGDAALNKFFRDIYKDADEDTRRAMMKSFVESNGTVLSTNWKKVGTKKVEGSPPDGMELKKW

SEQ ID NO: 42 - protein, 26 aa, Artificial sequence
  motif 1
DLETRAKEAFIDDHFELAVDLYTQAI

SEQ ID NO: 43 - protein, 10 aa, Artificial sequence
  motif 2
ADRAQANIKL

SEQ ID NO: 44 - protein, 16 aa, Artificial sequence
  motif 3
LEEYQTAKAALETGAS

SEQ ID NO: 45 - protein, 23 aa, Artificial sequence
  motif 4
KYRHEFYQKPEEVVVTIFAKGIP

SEQ ID NO: 46 - protein, 30 aa, Artificial sequence
  motif 5
QPRLFGKITPAKCRYEVMSTKIEIRLAKAE

SEQ ID NO: 47 - protein, 17 aa, Artificial sequence
  motif 6
EAQVKKEEKDEKLDGDA

SEQ ID NO: 48 - protein, 47 aa, Artificial sequence
  motif 7
ALNKFFRDIYKDADEDTRRAMMKSFVESNGTVLSTNWKKVGTKKVEG

SEQ ID NO: 49 - protein, 13 aa, Artificial sequence
  motif 8
SPPDGMELKKWEI

SEQ ID NO: 50 - DNA, 1264 bp, Oryza sativa
tcgacgctactcaagtggtgggaggccaccgcatgttccaacgaagcgccaaagaaagccttgcagactctaatgctattagtcgcctaggatatttggaatgaaaggaaccgcagagtttttcagcaccaagagcttccggtggctagtctgatagccaaaattaaggaggatgccaaaacatgggtcttggcgggcgcgaaacaccttgataggtggcttaccttttaacatgttcgggccaaaggccttgagacggtaaagttttctatttgcgcttgcgcatgtacaattttattcctctattcaatgaaattggtggctcactggttcattaaaaaaaaaagaatctagcctgttcgggaagaagaggattttgttcgtgagagagagagagagagagagagagagagagagagagaaggaggaggaggattttcaggcttcgcattgcccaacctctgcttctgttggcccaagaagaatcccaggcgcccatgggctggcagtttaccacggacctacctagcctaccttagctatctaagcgggccgacctagtagccacgtgcctagtgtagattaaagttgccgggccagcaggaagccacgctgcaatggcatcttcccctgtccttcgcgtacgtgaaaacaaacccaggtaagcttagaatcttcttgcccgttggactgggacacccaccaatcccaccatgccccgatattcctccggtctcggttcatgtgatgtcctctcttgtgtgatcacggagcaagcattcttaaacggcaaaagaaaatcaccaacttgctcacgcagtcacgctgcaccgcgcgaagcgacgcccgataggccaagatcgcgagataaaataacaaccaatgatcataaggaaacaagcccgcgatgtgtcgtgtgcagcaatcttggtcatttgcgggatcgagtgcttcacagctaaccaaatattcggccgatgatttaacacattatcagcgtagatgtacgtacgatttgttaattaatctacgagccttgctagggcaggtgttctgccagccaatccagatcgccctcgtatgcacgctcacatgatggcagggcagggttcacatgagctctaacggtcgattaattaatcccggggctcgactataaatacctccctaatcccatgatcaaaaccatctcaagcagcctaatcatctccagctgatcaagagctcttaattagctagctagtgattagctgcgcttgtgatc

SEQ ID NO: 51 - DNA, 51 bp, Artificial sequence
  primer: prm14133
ggggacaagtttgtacaaaaaagcaggcttaaacaatggcgtccgatctgg

SEQ ID NO: 52 - DNA, 52 bp, Artificial sequence
  primer: prm14134
ggggaccactttgtacaagaaagctgggtcacaaaagataaacagcagattg

SEQ ID NO: 53 - DNA, 2700 bp, Synechocystis sp.
ttactcgtctagaccgaaatctggggccaggggagggacgatcgcctcttcgttgggggagtccactggaccgcggaaaataaacacagtggtgttggtttggctagcgatttgggtgggtaaattgccgtggatgacatttttgagcaatccttccctactggcccccagcacgattgccgcacattcacgcatttccgccaggtcactgagggcatcggcaatggaagtggagcacacaggaatgggaataatcggtctttgtaactgttctgaccaccgttctgccaggttttttaaatcgtaaaaagggtcatagcgctgggattgacggggtagataaactttagaaatcagtagctgggggttattttcctccgggtaaagggaaaacaacgccggcaacagatttaacattttttcaatgttggggcctcccgctaccggcattaaccagtgggccatgggggataaatagcggggataggcgtggtcattggtgccctgtttaaccattaataaagagcagggggcttggtcaatcaggcgatccgtgatttggccaaaaatttggccgccaatgggcatttccccttgccattcaaggattagcaggtcgctatggcgggtttgaatggtatcaaggatggtgtcggtaatgctgtaggccagcttgatttccgtatggaataacactctctggtggcgggcaatgcgttccagtttttgcatcagttgccgttgcctctgccattgcaccctttgcacagaaggggattgagctttagataccttgaccacctgcaaacagtcaatttcgtagttttgctttttggcgattgccgccgcaatttgaaacaaaactaaagcactatcggagtcccggatgggtaataaaatgcgcccttctcccaccaacggcgatcgggtttggtatacgctgtaggcgggatggggaggatggataatttgcccccctaactgactcacttcctcccgaataatgtctgtgcgggtgataatgcccactaatttgttgtccccttccaccaccggcaaccgggaaagttgataacggttgagcaaatagagcacatcactgaggggcgcttccggatctacagtgatgggattgggggtcataatttgcttaagggcaatgtgcaccgactcctgggccgcattggccaaatccgtttgggtaaatacccccaccagtttgcccccctgcaccacgggaaagccccggtgatgggaattggacataatcggtagcacctgggctagggtgagactctgctccaggctttccacctccgttttcattacctggccagctcggatatcagcgagaaagtcatggtctggcttttcctctgccaaaaaaatgcccttggtttccagcaaatgatcgtacaaagaacggggaaagagactttccgccactagataggacgtggcacaggccaccatcaggggaagcaccacgttgaaattgcccgttagctcaaaaacaatgatgatcgccgtcactggcacccgcaccacactagtgaaaaaagcgcccatccccgccagggcaaaggtagtttgggtaacttgatcttgccaataactgccaaattcccccaccagataacccagggccgaccccatcactaaagccggcgcaaataatcctcccggcgcatcggtgctgtaggccaggatagtcaaaatgaaatgggccactaaggtcaaaactacctgatgccaactcagttctccggaagtaacaaattccctcagccctgcattgtcccgaaaaaagctcggcaatagggcgatcgccacgccggaaattaagcccacaacaccaatgcgaataaccagggaaaggttctgttttctttgccagttttgcagggagagaatactgcggttgagcaaaacccccaaaatgccagccaaaattcccagtaaaagatagaaaggaatctcccccgtagtaaaacgcaccgttgggctattgcttaagctatgggccaggttaaggtcactggattggaataccaaagacgtgacagcccccacgaaggaagcgacgatcgccgtttctagggtcaagctagacacatcccgcattaattcttccaccacaaacaaaaccccagcaatgggggtggtgaagcccgccgctaatcccgccgccgccccggccgcaatcatttgccgccgatgttccggggaagtgggaaaccaccgactcaactgggccgctagagctgcgccaatatgaaccgtgggagcccgccgtcccaaggtcatgcctccccccagcactagcactgttcccaacagcttgaccaccgccacccgccaatctaggggaataggataccgagccagggccgctttcacctggggaatgccaccgccccccgccggtcgggaaaattgttcaattaatgcccccgccaaacccccaaacaccaagccaaaacagggcagcacccaaatggccccataggtatccgccagactcaaacggctggaccctaaccagttgactccgtttttaattactaaggccgctagggcagaaacaaatccgatcacacaggcttcggcgatcgcataacggctatcgatggcagtgcggccatagtgtcgagagcgcaaccattgttgccaccgttgccaaaagggaaaccaagccat

SEQ ID NO: 54 - protein, 899 aa, Synechocystis sp.
MAWFPFWQRWQQWLRSRHYGRTAIDSRYAIAEACVIGFVSALAALVIKNGVNWLGSSRLSLADTYGAIWVLPCFGLVFGGLAGALIEQFSRPAGGGGIPQVKAALARYPIPLDWRVAVVKLLGTVLVLGGGMTLGRRAPTVHIGAALAAQLSRWFPTSPEHRRQMIAAGAAAGLAAGFTTPIAGVLFVVEELMRDVSSLTLETAIVASFVGAVTSLVFQSSDLNLAHSLSNSPTVRFTTGEIPFYLLLGILAGILGVLLNRSILSLQNWQRKQNLSLVIRIGVVGLISGVAIALLPSFFRDNAGLREFVTSGELSWHQVVLTLVAHFILTILAYSTDAPGGLFAPALVMGSALGYLVGEFGSYWQDQVTQTTFALAGMGAFFTSVVRVPVTAIIIVFELTGNFNVVLPLMVACATSYLVAESLFPRSLYDHLLETKGIFLAEEKPDHDFLADIRAGQVMKTEVESLEQSLTLAQVLPIMSNSHHRGFPVVQGGKLVGVFTQTDLANAAQESVHIALKQIMTPNPITVDPEAPLSDVLYLLNRYQLSRLPVVEGDNKLVGIITRTDIIREEVSQLGGQIIHPPHPAYSVYQTRSPLVGEGRILLPIRDSDSALVLFQIAAAIAKKQNYEIDCLQVVKVSKAQSPSVQRVQWQRQRQLMQKLERIARHQRVLFHTEIKLAYSITDTILDTIQTRHSDLLILEWQGEMPIGGQIFGQITDRLIDQAPCSLLMVKQGTNDHAYPRYLSPMAHWLMPVAGGPNIEKMLNLLPALFSLYPEENNPQLLISKVYLPRQSQRYDPFYDLKNLAERWSEQLQRPIIPIPVCSTSIADALSDLAEMRECAAIVLGASREGLLKNVIHGNLPTQIASQTNTTVFIFRGPVDSPNEEAIVPPLAPDFGLDE

SEQ ID NO: 55 - DNA, 2628 bp, Cyanothece sp.
atgaatatttatctgcccataaaacgcctacggggttggtttaaagccagacgctttggacggagttccgttgatacccgctacgccatgctagaagcttgtttaattgggattttatcggctgttgctgccttagtgttaaaacagggagtgggatggttagggggatggagactgagcctgacgagaacatttggagcgctctggatacttcctttagggggtttaatcttaggattactggcaggatgggtcatagaaattttatcaccggcagcggcaggaggaggaattccgcaagttaaggccgctttagctcgatttcccgttcccttatctttgcgggtagccctcgctaaattaatcggagctattttagtgttaggagcggggttgaccttgggacggagagcgcctacggttcatattggggcagctttagcagcgcaactgagtcaatggcttcccacttccccagaacatcgtcgtcaaatgattgcagccggagcagcctccggactagcagccggttttggaactcccatcgccggagttttatttgttattgaagaattgatgcgagatgtttctgggttgacattagagacggcgattattgcctcctttactggggcagtagtgtcgttattgctagagtctaccggtccgattatccctgcacctctaaacattaccttttctgcgcgagaaattcctttgtatcttttgcttggttttttagccggaattctaggggcgttatttaatgcgggtattctcttttgtatgagggtacaaaagcaacttagactaagcattccctggcgcataggcttagtttgcatgatttcaggggcggttattgcggtattacctcctttttttcgtgacaattctggattaagagaatttttaattacaggggaattaggttggcgtaatatcttattagcgttgattgcccatttttttctcactattttggcctatagttctagcgctccgggcggtctatttgcaccggctttagtgatgggatcagccctaggctatttagtgggggatttaggagaattattaacaggttcaggagcggctacaacttacgctttagcggggatgggagggttttttaccgcagtggttcgcgctccggtgacggccattgtgattgtctttgaattgagggctaattttaatattgtgctgcctttaatgattacctgtgcggtgtcttatttggtggctgaaaatgtgtttagtcggtctatttatgaacatttgctcgatgcgagtgggattcatttaaccgaagaaataccggttaatgatttcttgagtaaattaaaagcttctgatgtgatgcaatctcaggtagaaaccttagatagttatcttagccttgaggccgttttacaggccatgtcgatttctcgtcatcgagggtttccggtagtagaagagggaaaattagtgggaattgtgactcaaagtgatttgtcgaatctcggcgatcgctctgaggagcttaccctacgtcagattatgaccccaaaaccgattactgtgcaaccagaaacctccttaagtgatgttctttatttgctcaaccgttatcaattatcccgtttacccgtcaccgaaggacataaattagtcggcattattacccgcaccgatatcattcaagcagaggtgaagcaattgggagggggaacaatgcaaggatctaaacctgcaccttcctatgtcacctatcaaacccgttcgccggccttgggaaatggccgcattttattacccttatctgatggggaaatggccggaactttgttgcaaattgccgccgcgatcgcccgtcatcgcaactatgaaatagaatgtctccaagtgattaaagttcccagacatcaatttccctcagaagctaggatagatattcatcatagccgtaagttaatgcaacggatggaaagattggcgcgtcatctgaatgttcccgttcatactcaaattagaatcgctcaggatacagcacaatcgatcatagaaacaattcaggaacgacatataaatttaatgttgatgagttggaaaggaggaggagatactcaaggggcaatatttggcaatgttactgatacgttaattcataaagctccctgtgatttaatgttagtcaaattgggggcaagtcccactgcatatcctcacaacttagagcataatgcgacttggttagtgccgatggcaggagggccaaatgctcaacgagccattgaattattgccgagcttaacgacattatatgctaatcctaatgcgcctgagctttggttatgtaaagtctatcctcctacagaattagaacctaattcccaagcgttagaagaggcggcgcaaaccttaacagaaaagctcaataaatccattattcctatttctattcgttctcattctgtggctgatgctttgattcatttagcccaagcagaagtctgtgatttaattattttaggggcttctagagaagggttattacaacaggcaattcatggtaatattcctgatgcgatcgcttcgggggtggatagtacggttattgtcgtcaggggagcaattgattaa

SEQ ID NO: 56 - protein, 875 aa, Cyanothece sp.
MNIYLPIKRLRGWFKARRFGRSSVDTRYAMLEACLIGILSAVAALVLKQGVGWLGGWRLSLTRTFGALWILPLGGLILGLLAGWVIEILSPAAAGGGIPQVKAALARFPVPLSLRVALAKLIGAILVLGAGLTLGRRAPTVHIGAALAAQLSQWLPTSPEHRRQMIAAGAASGLAAGFGTPIAGVLFVIEELMRDVSGLTLETAIIASFTGAVVSLLLESTGPIIPAPLNITFSAREIPLYLLLGFLAGILGALFNAGILFCMRVQKQLRLSIPWRIGLVCMISGAVIAVLPPFFRDNSGLREFLITGELGWRNILLALIAHFFLTILAYSSSAPGGLFAPALVMGSALGYLVGDLGELLTGSGAATTYALAGMGGFFTAVVRAPVTAIVIVFELRANFNIVLPLMITCAVSYLVAENVFSRSIYEHLLDASGIHLTEEIPVNDFLSKLKASDVMQSQVETLDSYLSLEAVLQAMSISRHRGFPVVEEGKLVGIVTQSDLSNLGDRSEELTLRQIMTPKPITVQPETSLSDVLYLLNRYQLSRLPVTEGHKLVGIITRTDIIQAEVKQLGGGTMQGSKPAPSYVTYQTRSPALGNGRILLPLSDGEMAGTLLQIAAAIARHRNYEIECLQVIKVPRHQFPSEARIDIHHSRKLMQRMERLARHLNVPVHTQIRIAQDTAQSIIETIQERHINLMLMSWKGGGDTQGAIFGNVTDTLIHKAPCDLMLVKLGASPTAYPHNLEHNATWLVPMAGGPNAQRAIELLPSLTTLYANPNAPELWLCKVYPPTELEPNSQALEEAAQTLTEKLNKSIIPISIRSHSVADALIHLAQAEVCDLIILGASREGLLQQAIHGNIPDAIASGVDSTVIVVRGAID

SEQ ID NO: 57 - DNA, 2625 bp, Cyanothece sp.
ttaatcaatcgctcctcgtaccacaataaccgtactatcaaccccacgagcaatagcatcaggaatattcccatgaatagcctgctgtaataacccttcccgagacgctcccaaaacaatcacatcacactcttcggcgcgagctaattgtattaaagcatcagaaacagaattagaacgaatagaaataggaaaaatcggtttattcaatttatctcttaaaatttgagccgcttcttctaacccttgagaatccggttcaatctctgaaggaggataaactttacacagccacaactgaggggcatccggattagaatataatcgtgttaaactcggtaataattcaattgctcgttgagcatttggcccccccgccatcggcactaaccaagtagcattatgctctaaatttaggggataagcattagcactagctccaagtttaactaacattaaatcacagggagctttatgaatcaaggtatctgcaacactgccaaaaattgccccttgactatcactaattcctttccaactcattaacattaaactaatatgccgttgctgaatagtttctataatggattcagccgtatcctgagcgactctcacttgagtatgaacggcaatattcaaatgtcgccctaatctttccatacgctgcatcagcttgcggctatgatgaacctcaactcgagcttcagaaggaaattgatgtctaggaatcttaatcacttgcagacattcgatttcatagtggcgatgacgagcgatggttgcggcaatttgaaataaggttgcagccatctccggatcactaagcggcaataaaatccgtccattccccaaagccggcgaacgagtctgataaaccacataagacgggggcggtttagttccttgagttccgcctccgagttgcttaacttctgcttgaataatatcggtgcgggtaataatccccactaaaatatgtccttctgtcaccggtaaacgagataattgatagcggttgagtaaatagagaacatcacttaaagaggtttccggttgcacagtaatcggttttggggtcataatctcacgcagagatacatcgggtgagcgctcacccaaattcgataaatcactctgagtgacaattcccactaattttcccgcttctaccaccggaaacccgcgatgacgggatatagacatcgcctgtagcactttatctagagtaagatgactttctaagctttctacctgagactgcatcacatcagccgcttttaacttactcaagaaatcattaaccggcacttcctcgcttaaatgaatcccactcgcatcaagcaaatgttcataaatcgaacgactaaacacattttctgccaccaaataagacaccgcacaagtcagcatcaacggcagtacaatattaaaattagcctttaattcaaagacaatcacaatcgctgtcaccggagcgcgaaccaccgccgtaaaaaaccctcccattcccgccagcgcgtaagtggtagccgctcctgaacccgtcacccatccggctaattctcccacgatatagcccaaagcggaacccaacaccagcgccggggcaaataatcctccgggagcgcccgaactataagctaagatggttaggcaaaaatgagccacaaaagccaacagaatactacgccaacctaattccccagtgactaaaaactccctcagtcccgagttatcgcggaaaaaaggcggtaacagggcaatcactcccccagaaatcatacagactaagccaacccgccaaggcatcggcaatctcagccgcttttgtacgttcatacaaaagagaattccccaattaaataacgctcctagcattcccgctaaaaaaccgagcaaaagatatagaggaatttctcgagcggaaaagtttatgtttagaggtgcgggtataatgggaccagcagactcgagtaataaagataccactgccccagtaaaggaagccacgatggctgtttctaaagttaacccagagacatcgcgcatcaattcttcaaccacaaataaaactcccgctatgggagtcccaaaccccgccgctagtcctgaagcggccccggctgcaatcatctgtcgccgatgttctggggaagtgggaacccattgactcaattgagccgctaaggccgcccctatatgaactgtaggcgctcgccgcccaagggttaaccctgcgcctaatactaaggttgcccccagtaatttagcgatggctacccgtaaagacagaggcaccggaaagcgagctaaagcggctttgacttggggaatgcctccaccggcagccgccggtgagatcacttgtattaactgaccggccagtaatcctaataataatccgccgatgggaagtagccagactgccccaagtttagtagtaatatgaactcgccatcctcctaaccatcctaccccctgtttaaggagtaaggccgcgatcgccgataaaatcccgatgagacaagattccagcatggcatagcgggtatcgacggaactgcgtccgaaacgtctagctttaaaccaaccatgcaggcgttttaggggaaaaggtaaattcat

SEQ ID NO: 58 - protein, 874 aa, Cyanothece sp.
MNLPFPLKRLHGWFKARRFGRSSVDTRYAMLESCLIGILSAIAALLLKQGVGWLGGWRVHITTKLGAVWLLPIGGLLLGLLAGQLIQVISPAAAGGGIPQVKAALARFPVPLSLRVAIAKLLGATLVLGAGLTLGRRAPTVHIGAALAAQLSQWVPTSPEHRRQMIAAGAASGLAAGFGTPIAGVLFVVEELMRDVSGLTLETAIVASFTGAVVSLLLESAGPIIPAPLNINFSAREIPLYLLLGFLAGMLGALFNWGILFCMNVQKRLRLPMPWRVGLVCMISGGVIALLPPFFRDNSGLREFLVTGELGWRSILLAFVAHFCLTILAYSSGAPGGLFAPALVLGSALGYIVGELAGWVTGSGAATTYALAGMGGFFTAVVRAPVTAIVIVFELKANFNIVLPLMLTCAVSYLVAENVFSRSIYEHLLDASGIHLSEEVPVNDFLSKLKAADVMQSQVESLESHLTLDKVLQAMSISRHRGFPVVEAGKLVGIVTQSDLSNLGERSPDVSLREIMTPKPITVQPETSLSDVLYLLNRYQLSRLPVTEGHILVGIITRTDIIQAEVKQLGGGTQGTKPPPSYVVYQTRSPALGNGRILLPLSDPEMAATLFQIAATIARHRHYEIECLQVIKIPRHQFPSEARVEVHHSRKLMQRMERLGRHLNIAVHTQVRVAQDTAESIIETIQQRHISLMLMSWKGISDSQGAIFGSVADTLIHKAPCDLMLVKLGASANAYPLNLEHNATWLVPMAGGPNAQRAIELLPSLTRLYSNPDAPQLWLCKVYPPSEIEPDSQGLEEAAQILRDKLNKPIFPISIRSNSVSDALIQLARAEECDVIVLGASREGLLQQAIHGNIPDAIARGVDSTVIVVRGAID

SEQ ID NO: 59 - DNA, 2634 bp, Cyanothece sp.
ctaattatctaactttcctcgcactaaaatgacggtacttttcacttgttgagcgatcattttaggaatatttccttgcatcacttgaactaataacccttcgcgactgacccctaacataaccacatcacagctttctgcttcagctaaatgaatgatcgcatctgcgacagactgggaacgaacagggaggggaataacaggacgttctagttcttcttttaagcgtttagcttcaatttctaaggcttgataattaggggtcgatttatgggggggaaatacttgacataaccaaataataggggatcgaggacgagtatataattttgttaatccgggtaacaattccatagcccgtttggcattgggaccaccagcaataggaattaaccaagtggtatctttatctaaaatttggggataagcttctttttcttgtcccaattttactaagattaattcgcaagtcgctttgcgaattaaaatgtcaatgactggatcaaaaatggttcctggggtgtgatggtcatcggtccactctaacaccatgagattaatgtgtcgttctcgaatggtgtctaaaatggcttgagcgcgatcgtgggcgacacgaatttgagtatgaactgggatatgatagtgacggcctaatctttcagttctttgtaacaattgacgactgtgttgggtaattacgggggtttgagcaggatcactatgtttgggaacggtaatcacctgtagacattcaatttcttggttttgttgttgagcgatcgctgaactaattttaaacagagacgtagccgtatcagggttaactaaaggtaataaaatacgaccgtctccagctaagggggcccgagtttgataggcaatataggaaggatcaggaaccacttcgttaatggtggtatcatccccttgtaattgattggcttcaacccgaataatatccgttcgagtgataattcccactaacttatgaccttctgtcacaggaagacgggacaactgataacggttcagcagatataaaacatcactcagagacgcttctgcttgcactgtaatgggtcttcgggtcataaactcctgtaaaggagtatatcctggttctttttttaatttcgccagatccgtttgagtaacaatgcccaccagttgaccttgctctaccacaggaaaccctcgatgactggagttagacatggcttgtagcacttcatctagcgttaaatcactagataaggtttcgacttgagactccatcacctgagaagcggttaattttgagagaaaatcttgtcctgtggccgcttcgttgatatagataccccgagcgtgtaacatatgttcgtacagagaaccccgtgaaacactttcggccacgatataagacaccgcacaagtgaccattaggggtaagactatgttaaagtctgtattcagttcaaagacaaagacgatcgctgttactggtactctaaccactgccgtaaaaaaggctcccattcctgctagagcataacttgattgtgcgccagttcccgtcacaaattgttcaaaatctcctaccaaatagcctaaagccgatcctaacaccagagccggaccgaataaccctccaggagcattgcaactataggccaaaatggtgaggaaaaaatgagccacaaacgctaataaaattcgactcccatctaattctcctgtaactaaaaagatgcgaagtcctgcattatcccgaaagaaaggaggcaataaagcgataataatgcctgacaccattcccattaagccaatacgccaggataagggtaaattgaactttctttgtattgtgacactggttaggagtccccgattaaataacgcccctaatagtccggctaaaatgcctagaagtagataaaaaggaatgtctgagatagaaaaggtaatatcgggcagttccagtagtgaagagggaaaattgagggtagatgactgtaaaattaacgaaaccaccgctccggtaaaggaggcaacgatagccgtttctaaggttaaccctgaaacatctcgcatcaactcttcaatgacaaacaaaaccccggcaataggcgttgtaaaaccggctgctagtcctgctgctgctccggctgcgatcatttgtcgtcgatgttctggggaggtgggaacccagttactcagttgtgctgctaacgctgccccaatatgcactgttggtgcgcgacggcctaaggttaaacctccgcctaacactaaaatggttccaataagtttaaccactgctacccgtaaggataagggaactggatatcgagctaaagctgcttttacttgagtgataccgcctcctgtagcagttggggaaaaggtttcaatgatcaaacccgataaataacctaagatcagtccgcctaaaggaagcacccacattgccccaaactggttggctaaagcgacacgccaaccccctaaccaaccgactccttgtttcagaattaaggcagcgatcgcagaaagcactccaattaaactggcttcaactaaggcataacgggtatccgtggcattaaatgccaattttctcgatttgagccattgataaaaacgtcgaggcat

SEQ ID NO: 60 - protein, 877 aa, Cyanothece sp.
MPRRFYQWLKSRKLAFNATDTRYALVEASLIGVLSAIAALILKQGVGWLGGWRVALANQFGAMWVLPLGGLILGYLSGLIIETFSPTATGGGITQVKAALARYPVPLSLRVAVVKLIGTILVLGGGLTLGRRAPTVHIGAALAAQLSNWVPTSPEHRRQMIAAGAAAGLAAGFTTPIAGVLFVIEELMRDVSGLTLETAIVASFTGAVVSLILQSSTLNFPSSLLELPDITFSISDIPFYLLLGILAGLLGALFNRGLLTSVTIQRKFNLPLSWRIGLMGMVSGIIIALLPPFFRDNAGLRIFLVTGELDGSRILLAFVAHFFLTILAYSCNAPGGLFGPALVLGSALGYLVGDFEQFVTGTGAQSSYALAGMGAFFTAVVRVPVTAIVFVFELNTDFNIVLPLMVTCAVSYIVAESVSRGSLYEHMLHARGIYINEAATGQDFLSKLTASQVMESQVETLSSDLTLDEVLQAMSNSSHRGFPVVEQGQLVGIVTQTDLAKLKKEPGYTPLQEFMTRRPITVQAEASLSDVLYLLNRYQLSRLPVTEGHKLVGIITRTDIIRVEANQLQGDDTTINEVVPDPSYIAYQTRAPLAGDGRILLPLVNPDTATSLFKISSAIAQQQNQEIECLQVITVPKHSDPAQTPVITQHSRQLLQRTERLGRHYHIPVHTQIRVAHDRAQAILDTIRERHINLMVLEWTDDHHTPGTIFDPVIDILIRKATCELILVKLGQEKEAYPQILDKDTTWLIPIAGGPNAKRAMELLPGLTKLYTRPRSPIIWLCQVFPPHKSTPNYQALEIEAKRLKEELERPVIPLPVRSQSVADAIIHLAEAESCDVVMLGVSREGLLVQVMQGNIPKMIAQQVKSTVILVRGKLDN

SEQ ID NO: 61 - DNA, 2649 bp, Cyanothece sp.
atgcagcctcatttaatgcctcaacgtctttatcaatggttcaaatcaagaaactttgctcttaatgccacggacacccgttatgccttagtagaagcaagtttaattggagtgctttcagcgatcgcagccttgatcctcaaacaaggggtcggttggttaggaggttggcgtgttgccttagccaatgaattcggcggaatagtcgtgcttcccttgggaggacttattttaggctatttagccggttggatcatcgaaaccctgtcccccacagcgacaggaggcgggatcactcaagttaaagcagccttagcccgatatccggtgcctttatctttacgggtcgccatcgttaaattgattggaaccattttagtcttaggaggagggttaaccctcggccgtcgtgcgccaactgttcatattggggccgctttagcagcgcaactaagtagctgggttcctacctccccagaacatcgacgacaaatgatcgcagccggggcagcagcaggactcgcagccggttttaccacccccattgccggggttttatttgtcattgaagagttgatgcgggatgtgtcggggttaaccctagaaacggctattgtcgcctcttttactggggcagtggtgtctttaattttgcaatcgtctaccctcaatttgccctcctcattattagaactgcccgatattaccttttctgccttagatattcccttttatctgcttctaggcatcttagccggggtcttaggggctttatttaatcgaggactcctgctaagtgtcaaaatacaacatcagttcaatttacccttatcctggcgcattggtttaatgggaatggtttcaggtatcatcatcgcagtcctgcctcccttctttcgcgataatgcaggactgcggattattttggtcacgggggaattagattggagtcgcattttattggctttcgtcgctcattttttcctcaccattttggcctatagtgctaacacccctggagggttattcggtccagcactggtattgggatcggccttagggtatttagtgggagattttgagcaatttttgacaggaacgggtactcaatcgagttatgccttagccggaatgggggcgtttttcaccgcagtcgtcagggttccggtaacagcgatcgtctttgtctttgaactcaatacggatttcaatattgttttacccttgatggtgacttgtgctgtttcttatatcgtggctgagagtgtctcgcggggatctctctacgaacatatgttacacgctcgtgggatctatattaatgaagcggccacaggacaggattttctctccaaactcactgcgtctcaggtcatggagtctcacgttgaaactctatccagtgatttgtccttagatgaagtcctgcaagccatgtctaactctactcatcgggggtttcctgtggttgagcaaggtcaattagtcggcattgttacccagacggatctagctaaattgaagaaagtgccaggatatactcccttatcagaatttatgacccgacgacccattacggtacaagcagagtcctctttaagtgatgtgttataccttctcaaccgttatcaattgtcccgtcttcccgtaacagaaggccataaattagtcggaattattacccgaacagatattattcgcattgaagctaatcagttacaaggggatgataccaccatcaatgaggtggttcctgatccatcctatattgcctatcaaacacgggcccccttagctggtgagggtcgcattttattgccgttggttaaccccgatacggcaacctctctgtttaaaattagtgcagcgatcgctcaaaaacaaaaccaggaaatcgaatgtttacaggtgattaccgttcctaaacacagtgaccctgcccaaaccccggttattacccaacatagtcgtcaattattacaaagaaccgaacgattaggccgtcaatatcatcttcctgttcatactcaaattcgtattgcccacgatcgcgcccaagccattttagataccattcgagaacgacacatcgatctcatggttttacaatggaccgatgacaatcacagtccagggacgatttttgacccagtgattgatgttttaattcgtaaagctacttgcgaattagttctagttaaactaggtcaagaaaaagaagcgtatccccaaaccttagataaagatgccacttggttacttcccattgctggtggtcccaatgccaaacgagccatggaattgttacccggattaatcaaattatatactcgtcctcgttcccctattatttggttatgtcaggtattttctccccataaagctacccctaattatcaatccttagaagttgcagctaaacgtttaaaagaagaacttgaacgtcctgtgattccccttcctgttcgttctcagtctgtggccgatgccatcattcatttagccgaagcagaaacctgtgatgtggtcatgttgggggtgagtcgagaaggtttattagtgcaagtaatgcaaggtaatctgcctaaaatgatcgctcaacaggtgaaaagtacggtgattttagtgcgaggaaagttagataattag

SEQ ID NO: 62 - protein, 882 aa, Cyanothece sp.
MQPHLMPQRLYQWFKSRNFALNATDTRYALVEASLIGVLSAIAALILKQGVGWLGGWRVALANEFGGIVVLPLGGLILGYLAGWIIETLSPTATGGGITQVKAALARYPVPLSLRVAIVKLIGTILVLGGGLTLGRRAPTVHIGAALAAQLSSWVPTSPEHRRQMIAAGAAAGLAAGFTTPIAGVLFVIEELMRDVSGLTLETAIVASFTGAVVSLILQSSTLNLPSSLLELPDITFSALDIPFYLLLGILAGVLGALFNRGLLLSVKIQHQFNLPLSWRIGLMGMVSGIIIAVLPPFFRDNAGLRIILVTGELDWSRILLAFVAHFFLTILAYSANTPGGLFGPALVLGSALGYLVGDFEQFLTGTGTQSSYALAGMGAFFTAVVRVPVTAIVFVFELNTDFNIVLPLMVTCAVSYIVAESVSRGSLYEHMLHARGIYINEAATGQDFLSKLTASQVMESHVETLSSDLSLDEVLQAMSNSTHRGFPVVEQGQLVGIVTQTDLAKLKKVPGYTPLSEFMTRRPITVQAESSLSDVLYLLNRYQLSRLPVTEGHKLVGIITRTDIIRIEANQLQGDDTTINEVVPDPSYIAYQTRAPLAGEGRILLPLVNPDTATSLFKISAAIAQKQNQEIECLQVITVPKHSDPAQTPVITQHSRQLLQRTERLGRQYHLPVHTQIRIAHDRAQAILDTIRERHIDLMVLQWTDDNHSPGTIFDPVIDVLIRKATCELVLVKLGQEKEAYPQTLDKDATWLLPIAGGPNAKRAMELLPGLIKLYTRPRSPIIWLCQVFSPHKATPNYQSLEVAAKRLKEELERPVIPLPVRSQSVADAIIHLAEAETCDVVMLGVSREGLLVQVMQGNLPKMIAQQVKSTVILVRGKLDN

SEQ ID NO: 63 - DNA, 2640 bp, Cyanothece sp.
ctataaagctcctcgaactaaaataaccgtactatcaacctgtttagcgatcgccttgggaatattaccatgaatcacctgttctaagagtccctctcgactgacccccaacatgaccacatcgcaagtttcagccgccgctagatgaacgactgcatccgccaccgactgggaacgaatgggtaaaggaatcacaggccgagcaacggcatctttgacagcttgggcagtttgttcgagaacttggtagtcaggaagagcacccgcaggtggaaacaccttacaaagccaaataatcggcgatcgcggacgatcatacaatccagttaaccccggtaataattctagagcccgttgggcattgggtcccccggcgatgggaattaaccaagtcgcatccctgtttaaactgtcgggataacttggctcacggttgcccaatttaaccaaaactaactcacacggagctttacgaatcagtaaatccaccacatgaccaaaaatcgcccccggagtccccgtttctccattccattccatcaccattaaattgatatggcgttcacgaatcgtatctaaaatgccttgggcaatatcatgagcaaccctcacttgcgtatgaactggcagtttttgacgacggcctaagcgttccatgcgatggagtaaatggcgactatgttgcgacttaaccggggtttgggctggtttcttgtgtttaggaaccttaattacctgcaaacattctaattcgtcattttgttgcctagcgatcgctgctccaatttgaaacaaggccgttgccgttttggggtcagccaagggtaacaaaattcgtccccctcccgtggccggtgcacgggtttgataggcgatataggagggttctgggatggcttcattgagtttagaatcattcccctccagttgattcgcttcgacacggataatatcggtacgggtgatgattccgaccaacttacttccttcggtcacaggaagacgggacaactgataacggttcaataaatagagaacatcactcaataaagcatcagcttcgacgctaataggacggggagtcataaactgcttgacgggggtttgactcgacagcttggcagcgttggccacatcggtttgggtaacaatgcccactaatttaccttcttccatcaccggaaacccgcgatgactcgataaggacatagcttggatcacctgatctaaggttaagtcactgggtaaggtttccacctgagattgcatgacatcggctgccgtcaattgagagagaaaatcctgaacgacagggttattatccaggtaaatgccccgcgctttgagcattcgttcgtataaagacccccgtgaaaaactgtcggccaccacataggcaaccgaagaagtaaccattaacggcagaacgatattaaaattgctattcagttcaaaaacaatcacaatagccgtaacaggaacgccaactactgccgaaaaaaagccccccatccccgctaaggcaaaggctgattggctactacttcccatgatgaactgctccaaatcccccactaaatagcctaaggccgaacccaagactaaggccggggcaaataacccccctggagcattagaactataggccaacatggtcagaaaaaaatgggcaacaaaggctaagaaaattttctcggtactgagttcccccctcaccaagacagtctgaagtcgggtattatcttgaaaaaatgggggcaacagagcaataattaggccagaaatcattgcaactagcccaatacgccagggtaggggtaatttgagacgactttggatagctaaactgaacagtaacccttgtttaaagagagcccccaaaaaccctgcgagtatgcctaataataggtaaaagggaatatcgtccaccgaaaaactaatattcgggagattcaagaggggggcaaaagacagcgatcgcgcttcaacaattaacgagacgactgccccagtaaaggaggcaatgatggaggtttgcagcgttaaccctgagacatctcgcatcaactcttctacaacgaacaacacacctgcaattggggttccaaaaccggccgcgagtcctgccgccgcgccggccgcaatcatttgtcgacgatgttcaggggaagtaggaacccaactactcaactgtgccgctaaggctgcaccgacatgaacggttggggctcgccgaccgagggttaatcctcctcctaggactagaattgtgccaatgagtttaacgaccgctactcgcagggacaaaggcactggataacgggctaaggccgctttaacttgggtaataccgcctcctgcggcggtaggagaggtttgttcgattaaccatccagccatcgaacctaaaaagagtccccccaagggaagtacccaaattgctcccaattgattggctagactaacccgccatcctcctaaccagcctactccctcttttaatattaaggcagcgattcctgagagtaatcctagtaaacaagcttctacaaaggcatagcgagaatcagtggcatttactcccaagtggctagatttgacccattggtagaggcgtttaacgattaaatgaggcttcat

SEQ ID NO: 64 - protein, 879 aa, Cyanothece sp.
MKPHLIVKRLYQWVKSSHLGVNATDSRYAFVEACLLGLLSGIAALILKEGVGWLGGWRVSLANQLGAIWVLPLGGLFLGSMAGWLIEQTSPTAAGGGITQVKAALARYPVPLSLRVAVVKLIGTILVLGGGLTLGRRAPTVHVGAALAAQLSSWVPTSPEHRRQMIAAGAAAGLAAGFGTPIAGVLFVVEELMRDVSGLTLQTSIIASFTGAVVSLIVEARSLSFAPLLNLPNISFSVDDIPFYLLLGILAGFLGALFKQGLLFSLAIQSRLKLPLPWRIGLVAMISGLIIALLPPFFQDNTRLQTVLVRGELSTEKIFLAFVAHFFLTMLAYSSNAPGGLFAPALVLGSALGYLVGDLEQFIMGSSSQSAFALAGMGGFFSAVVGVPVTAIVIVFELNSNFNIVLPLMVTSSVAYVVADSFSRGSLYERMLKARGIYLDNNPVVQDFLSQLTAADVMQSQVETLPSDLTLDQVIQAMSLSSHRGFPVMEEGKLVGIVTQTDVANAAKLSSQTPVKQFMTPRPISVEADALLSDVLYLLNRYQLSRLPVTEGSKLVGIITRTDIIRVEANQLEGNDSKLNEAIPEPSYIAYQTRAPATGGGRILLPLADPKTATALFQIGAAIARQQNDELECLQVIKVPKHKKPAQTPVKSQHSRHLLHRMERLGRRQKLPVHTQVRVAHDIAQGILDTIRERHINLMVMEWNGETGTPGAIFGHVVDLLIRKAPCELVLVKLGNREPSYPDSLNRDATWLIPIAGGPNAQRALELLPGLTGLYDRPRSPIIWLCKVFPPAGALPDYQVLEQTAQAVKDAVARPVIPLPIRSQSVADAVVHLAAAETCDVVMLGVSREGLLEQVIHGNIPKAIAKQVDSTVILVRGAL

SEQ ID NO: 65 - DNA, 2649 bp, Crocosphaera watsonii
ctaattgtccaactttcctctcactaaaatcatggtacttttgacctgctgggcgatggttttaggaatattgccctgcattacttgagctaataacccttctttactcacccccaacataaccacatcacagctttcggactcggccaaatgaacgatcgcatcagtgacagactgggaacgaatgggaaggggaattacagggcgttccagttgttcttttaattgttgtgccttagcttctaaagattgatagtcaggagtcggtttatggggagaaaacacctgacataaccaaataatgggggaacggggacgagtatataattgggttaatcctggtaataattccatggcccgtttagcattgggaccaccagcaataggaatcaaccaagtggtatctttatctaaagtttgggggtaagcttctttttctttgcccaacttaactataactaactcacaagtggccctacgaattaaaatatcaatcaccggcccaaaaacactaccaggagtctttttgtctgggttccattctaagactatgagattgatatgtcgttctcgaatggtgtctaaaatagcttgggcgcgatcgtgagcaacacgaatttgagtgtgaacagaaatctggtgttgacggcctaatctttctgctctttgtaataattgacgactctgttgggtgattacagtggtttgtgccggatcgctatgtttagggatcttaattacctgtaaacattcgatttcttggttttgttgttcggcgatcgctgcactaattttaaacaaagaagttgctgtatttatgtttgtcaggggtaacaaaatgcgtcccactcccactaaaggggcgcgggtttgataagcaatataggagggatcggggaccacttcattaatagtcgtatcatccccttgtaactggttggcttcgatgcgaataatatcggttcgggtgataattcctactaatttatgcccttctgtcacaggtagacgggaaagttgataacggttaagtaggtataaaacatcgcttaaagaagcctctgcttgtactgtaatgggttttcgagtcatgaattcccataaaggggtgtatcctggcactttcttcaattttgccagatcagtttgagtgacaatacccactaattgaccttcggccagcaccggaaaccctcgatgactcgaagccgacatcgcttgtagtacgtcatctaaagtgaagtcgctggataaggtttccacctgagactgcattacttctgaagcggttaatttagagagaaaatcctgtcctgtagccccttcattgatatagatccccctagcctttaacatatgttcgtagagagaacccttggagacactttcggccacgatataagaaacagcacaagtaaccattaagggtaaaacaatattaaagttcgtatttagttcaaagacaaagacgatcgccgttaccggaaccctaacaactgctgtgaaaaatgctcccattcctgccagtgcataggtagtctctgtgccggtgccagttaataattcttcaaaatctcccactagataccctaaagcagatcccaacaccagcgccggaccgaataaaccgccgggggtattggcactataggccaaaatagtcaggaaaaaatgagctacaaaagccaataaaatgcgactccattctaattctccttgtactaaatcaatacgcagtcctgtattatctcgaaagaaagggggtagtatggcaataattagacccgaagccatgcccattaagccaatacgccaggataaaggtaaattaagatatttttgtattttgacgctgagtaatagtccccgattaaataaagcccctaagatccctgctaatattcccagtagtaggtaaaagggaatttctgaggcggagaaagcaatatcaggcagatccaacaaagaggagggaaaattgaaggtagaagattgcaaaatttgggagacaactgctccggtaaaagaggccacgatcgccgtttctagggttaacccagaaacatctcgcattaactcttcaatgacgaataacaccccggcgatgggggtggtaaaaccggccgctagtccggctgctgccccggctgcgatcatttgtcgtcgatgttccggggaagtgggaacccaactactcagttgcgctgctaaggctgccccaatgtgtacagtaggcgcacgacggcctagggttaagccgccccctagcaccaaaatggttccgattaatttaaccagtgctacccgtagagagaggggaactggataccgggctaaagcggcttttacttgagtcatcccgccccctgtagctgtgggggagagggtttctatgagccaaccggccatggaacctaaaattagtcctcccaagggtagcacccatattgcaccaaattgattggccaaggccacacgcttaccccctaaccaacctactccttgtttgagaattaaggctgcgatcgccgataaaatcccaattaaacaggcttctgctaaggcataacgggtgtcagtggcatcaacagtacgcagtcttgattttaaccagcgataaaaacgttgaaatattaaatgaggccccat

SEQ ID NO: 66 - protein, 882 aa, Crocosphaera watsonii
MGPHLIFQRFYRWLKSRLRTVDATDTRYALAEACLIGILSAIAALILKQGVGWLGGKRVALANQFGAIWVLPLGGLILGSMAGWLIETLSPTATGGGMTQVKAALARYPVPLSLRVALVKLIGTILVLGGGLTLGRRAPTVHIGAALAAQLSSWVPTSPEHRRQMIAAGAAAGLAAGFTTPIAGVLFVIEELMRDVSGLTLETAIVASFTGAVVSQILQSSTFNFPSSLLDLPDIAFSASEIPFYLLLGILAGILGALFNRGLLLSVKIQKYLNLPLSWRIGLMGMASGLIIAILPPFFRDNTGLRIDLVQGELEWSRILLAFVAHFFLTILAYSANTPGGLFGPALVLGSALGYLVGDFEELLTGTGTETTYALAGMGAFFTAVVRVPVTAIVFVFELNTNFNIVLPLMVTCAVSYIVAESVSKGSLYEHMLKARGIYINEGATGQDFLSKLTASEVMQSQVETLSSDFTLDDVLQAMSASSHRGFPVLAEGQLVGIVTQTDLAKLKKVPGYTPLWEFMTRKPITVQAEASLSDVLYLLNRYQLSRLPVTEGHKLVGIITRTDIIRIEANQLQGDDTTINEVVPDPSYIAYQTRAPLVGVGRILLPLTNINTATSLFKISAAIAEQQNQEIECLQVIKIPKHSDPAQTTVITQQSRQLLQRAERLGRQHQISVHTQIRVAHDRAQAILDTIRERHINLIVLEWNPDKKTPGSVFGPVIDILIRRATCELVIVKLGKEKEAYPQTLDKDTTWLIPIAGGPNAKRAMELLPGLTQLYTRPRSPIIWLCQVFSPHKPTPDYQSLEAKAQQLKEQLERPVIPLPIRSQSVTDAIVHLAESESCDVVMLGVSKEGLLAQVMQGNIPKTIAQQVKSTMILVRGKLDN

SEQ ID NO: 67 - DNA, 2628 bp, Microcystus aeruginosa
ctaatctgataattcccctcgcacgagaatcacagtgcaattaaccgcacgggcaatcgtcgaggggatattgccatttaagaactgattgagcaagctttccctagatgcacccaaaagcaccaacgaacagtcttccgattctaccagattaattattgcctcggccggagaggccgaacgaatcggtaaaggcacaatcggctgtgcgatcgctttctgtaaagatgcttgtaaaacttccaaaatagacagatctggcagtaaatccgtcggagaatagattttacataaccaaagtttgggataatccgaagactcggacaaagacaacaaactaggcaataatgctaaagcgcgttgggcattaggaccgccggcggtgggaatcagccaaatcctttcccgattaggatcattgggaaaacaatcctttgtccccaattttaccaagatggtttcacagggagcttgggcgatcaaagtatcgactaaaaacccaaaaatcgccccagtagtggatctttcccccgtccaacccataattaataaattgctgtgtcgttcgcgaatcgtggccaaaatcccttcggcgatatcctgagccaccgaaatttgtgtatgaacagagatattctgctgtcgcgctaatctttccagacgatgaagtaatttgcgtccttcccgcgtatctacctttacttccgccggagaactaagacgaggtacagtaatcacatagagacaatctatctcataattgcgttcacgggcgacagcagcagcaattttaaacaaagcggtagcggtgtcgggattggcaatgggtaacaaaatccggcctattcccacagccggagaacgagtttgataaaccacataggaaggggtagtgggttgaggcagttgacaaaccccccccaattgatcagcttccacccggataatatcggtgcgggtgatgatccccaccagtttttgaccatcggtaacgggtaaacgggaaagctgatagcgatttaacagaaataaaacatcgcttaaggctgcctggggagccaccgtaatcggattgggagtcatcatctcccgtaggacggtttgactgttttttgatcgccatttatccagatcactttgggtaaaaatccccaatagtcgcccctgttccaccacgggaaaaccgcgatgatgggaacgggacataattttcaccacttcccccaggggtaaatccgccgccagaatttccacctgcgattgcatcacatccatagccgatagatgggccagcacatcattagcaggggtttcctcgttgagaataataccactagcggaaagtaaatgctcatagagggaaccggggcgaatgctttcggcagtaatataagaaacggcacaggtcaacatcaggggcagcacaatattaaaattgcgatgcagttcaaagacaatcacgatcgccgttaccggaaccctgactactcccgtaaaaaaggcccccataccggctaaagcataactaggttcgctgccgaaacccataattttcgtctcgattccccccaccagaaaccccaaacaggatcccaacaccaaagcgggggcgagcagtcctccaggagcgccggaactataggagatcatcgtcaggaaaaaatagaccacaaaagcgagggcggtattctgccaacttaattcccctgccagcaaaaattcgcgtaaacccgtattatctcgaaaaaagtcgggtaaaaaagccactaccgttcccgataggccactgaccagaccgatgcgccaagctaaagataaccgccaacgccgctgcatctggctacaaaaaaggatgccttgattgaataaagcccccaataagcccgctaaaacccccaaaaggcaataaatgggtatttcttgggcagagaagctaatattggcatattcagtgatgatcgagggggtattctgcagcatcatcgaaaccacggccccggtaaaggaagccacgatcgccgtttctagggtcatactggaaacatcgcgcattaattcctcgatcacaaagaggactccggcgatgggcgtagtaaaaccggccgctaacccggcggctgccccggctgcgatcatctgacgacggtgatcgggactggtgggcagccagacgcttaactgggccgccagggctgccccgatgtgtaccgtgggggcccgacgaccaagggttaaaccaccgccaaggatcaggatcgccccgatcatttttacgacggcaacgcgccaagacaggggcaaagggtatttagctagggctgcttttacttggggaataccccccccggcggctgcgggggagaagtgttccacaatccagccggcgctataaccaagcagaaaaccgccgaggggcaaaactaggaaaggagaggaattggctactagatgcacccgccaaccacctaaccaaccgatgcccaatttcaggataatagcggcaagggcggagagaattccgattaaacaggcgaccagtaaagcatagcgactatcggtggcgctacgtccgaagtgttgggatttaaaccactgacggaggttttggtaacgggcaaaaagtcccat

SEQ ID NO: 68 - protein, 875 aa, Microcystus aeruginosa
MGLFARYQNLRQWFKSQHFGRSATDSRYALLVACLIGILSALAAIILKLGIGWLGGWRVHLVANSSPFLVLPLGGFLLGYSAGWIVEHFSPAAAGGGIPQVKAALAKYPLPLSWRVAVVKMIGAILILGGGLTLGRRAPTVHIGAALAAQLSVWLPTSPDHRRQMIAAGAAAGLAAGFTTPIAGVLFVIEELMRDVSSMTLETAIVASFTGAVVSMMLQNTPSIITEYANISFSAQEIPIYCLLGVLAGLLGALFNQGILFCSQMQRRWRLSLAWRIGLVSGLSGTVVAFLPDFFRDNTGLREFLLAGELSWQNTALAFVVYFFLTMISYSSGAPGGLLAPALVLGSCLGFLVGGIETKIMGFGSEPSYALAGMGAFFTGVVRVPVTAIVIVFELHRNFNIVLPLMLTCAVSYITAESIRPGSLYEHLLSASGIILNEETPANDVLAHLSAMDVMQSQVEILAADLPLGEVVKIMSRSHHRGFPVVEQGRLLGIFTQSDLDKWRSKNSQTVLREMMTPNPITVAPQAALSDVLFLLNRYQLSRLPVTDGQKLVGIITRTDIIRVEADQLGGVCQLPQPTTPSYVVYQTRSPAVGIGRILLPIANPDTATALFKIAAAVARERNYEIDCLYVITVPRLSSPAEVKVDTREGRKLLHRLERLARQQNISVHTQISVAQDIAEGILATIRERHSNLLIMGWTGERSTTGAIFGFLVDTLIAQAPCETILVKLGTKDCFPNDPNRERIWLIPTAGGPNAQRALALLPSLLSLSESSDYPKLWLCKIYSPTDLLPDLSILEVLQASLQKAIAQPIVPLPIRSASPAEAIINLVESEDCSLVLLGASRESLLNQFLNGNIPSTIARAVNCTVILVRGELSD

SEQ ID NO: 69 - DNA, 2628 bp, Microcystus aeruginosa
ctaatctgataattcccctcgcacgagaatcacagtgcaattaacggcacgggcaatcgtcgaggggatattgccatttaataactgattgagcagactctctctagatgcacccaaaagcaccaaggaacaatcttccgattctaccagattaattaccgcctcggccggagaggccgaacgaatcggtaaaggcacgactggctgtgcgatcgctttttgtaaagatgcttgtaaaacttccaaagtggacagatctggcagtaactccgtcggagaataaattttacataaccaaagttcgggatgatccgaagactcggacaaagacagcaaactaggcaataatgctaaagctcgttgagcattgggacctccggcagtgggaatcagccaaatcctttcccgattaagatcgttgggaaaacaatcctttgtccccaattttaccaagatggtttcacagggagcctcagcgatcaaagtatcgactgaaaacccgaaaatcgccccagtagtggatttttcccccgtccaacccataattaataaattgctgtgtcgttcgcgaatcgtggctaaaatcccgtcggcgatatcctgagccacagaaatttgtgtatgaacagagatatgctgctgtcgggctaatctttccagacgatgaagtaatttgcgtccttcccgtgtatctacctttacttccgccggagaactaagacgaggcacagtaatcacatagagacaatctatctcataattgcgttcactggcgatcgcagcagcaattttaaacaaagcagtagcggtgtcaggattggcaataggtaataaaatccggcctattcccacagctggggaacgagtttgataaaccacataggaaggggtactgggttggggcagttgacaaactccccccaattgatcggcttccacccgaataatatcggtgcgggtgatgatccccaccagtttttgaccgtcggtaacgggtaaacgggaaagctgatagcgatttaagagaaataaaacatcggttaaagctgcctggggggccacagtaatcggattgggagtcatgatctcccgtaggactgtttgactgttttttgatcgccatttatccagatcactttgggtaaaaatccccaatagtcgcccctgttccaccacgggaaaaccgcgatgatgggaacgggacataattttcaccacttcccccaggggtaaatccgccggcagaatttccacctgcgattgcatcacatccatagccgacagatgggccaacacatcattagaaggggtttcttcgttgagaataataccactagcggaaagtaaatgctgatagagggaaccggggtgaatgctttcggcagtgatataagaaacggcacaggtcaacatcaggggcagcacaatattaaaattgcgatgcagttcaaagacaatcacgatcgccgttaccggaaccctgactactcccgtaaaaaaagcccccataccggctaaagtataactaggttcgctgccgaaacccatcattttcgtctcgattccccccaccagaaaccccaagcaggatcccaacaccaaagcgggggcgaggagtcctcccggagcgccggaactataggagatcatcgtcaggaaaaaatagaccacaaaagcgagggcggtattctgccaacttaattcccctgccagcaaaaattcgcgtaaacccgtattatcccgaaaaaagtcgggtaaaaaggccactaccgttcccgataaccagctgaccagaccgatgcgccaagccagagataaccgccaacgccgctgcagctggctacaaaaaaggatgccttgattgaataaagcccccaataagcccgctaaaacccccaaaaggcaataaatgggtatttcttgggcagagaagctaatattggcatattcagtgatgatcgagggggtattctgcagcatcatcgaaaccacggccccggtaaaggaagccacaatcgccgtttctagggtcatactggagacatcgcgcattaattcctcgatcacaaagaggacgccggcgatgggagtagtaaaaccggcggctaaccccgcggctgccccggctgcgatcatctgacgacggtgatcgggactggtgggcagccagacgcttaattgggccgctagggctgctccgatgtgtaccgtaggggcgcgacgaccaagggttaaaccaccgccaaggatcaggatcgccccgatcatttttactagggcgacccgccaagacaggggcaaaggatatttagctaaggccgcttttacttggggaataccacccccggcggccgcgggggagaagtgttcgacaatccaaccggcactgtaaccgagcagaaaaccgccgaggggcaaaactaggaaaggagaggaattggctactagatgcacccgccaaccacctaaccaaccgatacccaatttcaggataatagcggcaagggcggagagaattccgattaaacaggctaccagtaaagcatagcgactatcggttgcgctacgtccgaagtgttgggatttaaaccactgacggaggttttggtgacgggcaaaaagtcccat

SEQ ID NO: 70 - protein, 875 aa, Microcystus aeruginosa
MGLFARHQNLRQWFKSQHFGRSATDSRYALLVACLIGILSALAAIILKLGIGWLGGWRVHLVANSSPFLVLPLGGFLLGYSAGWIVEHFSPAAAGGGIPQVKAALAKYPLPLSWRVALVKMIGAILILGGGLTLGRRAPTVHIGAALAAQLSVWLPTSPDHRRQMIAAGAAAGLAAGFTTPIAGVLFVIEELMRDVSSMTLETAIVASFTGAVVSMMLQNTPSIITEYANISFSAQEIPIYCLLGVLAGLLGALFNQGILFCSQLQRRWRLSLAWRIGLVSWLSGTVVAFLPDFFRDNTGLREFLLAGELSWQNTALAFVVYFFLTMISYSSGAPGGLLAPALVLGSCLGFLVGGIETKMMGFGSEPSYTLAGMGAFFTGVVRVPVTAIVIVFELHRNFNIVLPLMLTCAVSYITAESIHPGSLYQHLLSASGIILNEETPSNDVLAHLSAMDVMQSQVEILPADLPLGEVVKIMSRSHHRGFPVVEQGRLLGIFTQSDLDKWRSKNSQTVLREIMTPNPITVAPQAALTDVLFLLNRYQLSRLPVTDGQKLVGIITRTDIIRVEADQLGGVCQLPQPSTPSYVVYQTRSPAVGIGRILLPIANPDTATALFKIAAAIASERNYEIDCLYVITVPRLSSPAEVKVDTREGRKLLHRLERLARQQHISVHTQISVAQDIADGILATIRERHSNLLIMGWTGEKSTTGAIFGFSVDTLIAEAPCETILVKLGTKDCFPNDLNRERIWLIPTAGGPNAQRALALLPSLLSLSESSDHPELWLCKIYSPTELLPDLSTLEVLQASLQKAIAQPVVPLPIRSASPAEAVINLVESEDCSLVLLGASRESLLNQLLNGNIPSTIARAVNCTVILVRGELSD

SEQ ID NO: 71 - DNA, 2637 bp, Synechocystis sp.
tcattcggggtcagtgacgtctaaggccccccgaataatcaccactgtgcggtttgtccccttggcgatcgcctccgggatatttccatggagcgccttttgaaataagctttctcggctagctcccagaatgaccagatcgtaggtttcttctttgattaggcggattaaactgtcagcaatgtgggacgagcgaataggtaggggaataatgggaatttcgaccaggggatccaagcctcgcttggccttgacgagcagcggaaaatgttgggggcgttgttggggttgatagacctgacagaggcaaatttgggacggcagggaatagcgcaccacctctggggacaggtgcagcagtgctgggatgaattcctgggcgcgttcggcgttggggccgcccgcaatgggaacgagggcgcggatttttcctgtttgagccttaaattggaggggatgggcgtggctcgttttcaccaaaatcacgtcacagggcacttttttcacgagatattccattacactcccgaacagttgcccccctgggtggcgatcgccttgccaacccaagattaacccctgatccttgctcgaaatttcctgaagaatggccccggccacatcgtaggcgaggatcacttgggtgtggattgagatccccaatgtctccccaaggcgttccagtttttccatcagatgccgttctggataggtgttcatgtgggcatcggtgaggggataggttgctgccacctgcaccacattcaggcaatagaccatggcatttttttccttggcaatggctgccgcaaaggtgatgagggcttcggcggtattgggattggcgatcgccacccagagtttgcgcttgtaattgtcgctggtgtgggtttgataaacgcaataggacggcgtgcgctgtactgcatggtgacttttcccgaggagttcctgggcctcggcacgaataatatctgaccgggtaataatcccctggagctgatcattatcgacgacaggtaggcgggaaatttgataacgattgagcaggtacaaaacatcactaagggaagcccggggagagaccgtaatcaccttgcgttgcatcacctgggctaccgttaaattctttccctgggccgccatttgggccagatccccttgggtgacaatgccgacgagcttgccttgttttaaaaccggaaaaccccggtggggcgattcagacaggatggggactaaatcctttaagttgaggtggctttccagggtttctacttccggttgcatcacctgggcggcggtgagatccgttaacacctgggggtttttttcctcctctaggtgaatgccgctggcttccaggagatactcgtagatcgaacctttaaaaatgctttcggccacgatgagcgctgtcaccgaagccagcattaaggggaggactaaattaaaatctgtggtcagctcaaagacaattacaatcgcggtcactggcacccgcgccacccctgtaaaaaaagcccccatccccgcaagggcgtaggtatattgggtcgcctctggcacaaagatctcggcacaggtacccactaaataaccgagggccgtgcctaaaacgagggtcggtgcaaatagtccccccggtgcgccggagccataggcaatcaagcttaggaaaaagtgggcgacaaaggcgatcgcaattacctgccagcccgcatcccccgtaagcaaaaaatcccgtagccctgcattgtcccggaaaaaaggcggcaaaaacgcgaccacagtgcccgaaatcgccccggcgatcgccatccgcacccccaagctcaaacggagacgacgattaaaccccaaaaccgttaagataccgcgattgaataaagcccccaaaacccctgccaagccccccaacagcaaataccaggggatttctgccagataaaaattactttgattcgccgcgtttaatagctctgcgggcaaattcagatccgaagtgccaaaccagcgggagaccaccgcgcccgtaaaggaagcaacaattgctgtttctaaagtcagccctgacatgtcccgcatcagttcttcgaccacgaacagtaccccagcaatgggggtattaaatcccgccgctaaacccgccgctgctccggctgcaatcatctgtcgtcggtggtttggggttgtcggcagccattgactgagttgagctgcgagagccgcaccgatatggacactggggccgcgccgtccgagggtcagtccaccacctagaaccaaaatcgtgccaatggatttagctaaggctaccttccaatttagcggcaggggaaattgggccaggacaaccttgacctgggggacgccgccccccttggcttctggggcaaaggtctctaggagatagcccgccaaccagccgcaaaccaccccaaacagaggcaggattaaccaggcgccgtattgacgactcaggatgacccgatatccccccacgaaaccaatgccttgtttgaggaaaagggccgccaaaccggagatgacaccaatgaggcaggcttcgattaataaatagttattgtttaagctgtgctggcctaaggatcgaaaaatccaccaatttcgcac

SEQ ID NO: 72 - protein, 878 aa, Synechocystis sp.
MRNWWIFRSLGQHSLNNNYLLIEACLIGVISGLAALFLKQGIGFVGGYRVILSRQYGAWLILPLFGVVCGWLAGYLLETFAPEAKGGGVPQVKVVLAQFPLPLNWKVALAKSIGTILVLGGGLTLGRRGPSVHIGAALAAQLSQWLPTTPNHRRQMIAAGAAAGLAAGFNTPIAGVLFVVEELMRDMSGLTLETAIVASFTGAVVSRWFGTSDLNLPAELLNAANQSNFYLAEIPWYLLLGGLAGVLGALFNRGILTVLGFNRRLRLSLGVRMAIAGAISGTVVAFLPPFFRDNAGLRDFLLTGDAGWQVIAIAFVAHFFLSLIAYGSGAPGGLFAPTLVLGTALGYLVGTCAEIFVPEATQYTYALAGMGAFFTGVARVPVTAIVIVFELTTDFNLVLPLMLASVTALIVAESIFKGSIYEYLLEASGIHLEEEKNPQVLTDLTAAQVMQPEVETLESHLNLKDLVPILSESPHRGFPVLKQGKLVGIVTQGDLAQMAAQGKNLTVAQVMQRKVITVSPRASLSDVLYLLNRYQISRLPVVDNDQLQGIITRSDIIRAEAQELLGKSHHAVQRTPSYCVYQTHTSDNYKRKLWVAIANPNTAEALITFAAAIAKEKNAMVYCLNVVQVAATYPLTDAHMNTYPERHLMEKLERLGETLGISIHTQVILAYDVAGAILQEISSKDQGLILGWQGDRHPGGQLFGSVMEYLVKKVPCDVILVKTSHAHPLQFKAQTGKIRALVPIAGGPNAERAQEFIPALLHLSPEVVRYSLPSQICLCQVYQPQQRPQHFPLLVKAKRGLDPLVEIPIIPLPIRSSHIADSLIRLIKEETYDLVILGASRESLFQKALHGNIPEAIAKGTNRTVVIIRGALDVTDPE

SEQ ID NO: 73 - DNA, 2664 bp, Nodularia spumigena
atggcgatttctggtctgactcagcgctttcgcctttggttgcaaccgacaagaggtttagcgatcgccgaagcttgtattattggacttgtagccgccctttctgcggtgttcctgaaattcggctcaggatttttaggaacatggcgagtccaaactagccaaattgtaccagcattgttagtcttacctaccattggtctgagctttggatttatagctggctctttggtgaatagatttgcaccagaagcttcagggagcggtatccctcaagtcaaagccactcttgctaacgtcccaattacattatcctggcgagtggcaacggtaaagttaatcagtgctattatcaccctcggttcaggaatggctctggggcgacaaggccccaccgttcatgtaggggcgggtttagcagcaggaatgagtcgctgggttcccacctccccagatcatcgacgacagatgattgctgcgggtgctggtgcgggtttagcggccgctttcaatgccccaatcactggtgtattgtttatcgtagaggaattactccaagatttatcagggctgactttaggaaccgccattatcgcttcctttattggtggtgtagtatctcggctgttgggtgggggtagtttgcaacttaacctggaattgttgcaatacgccagtaacttcactttgccagaaattcccttttttgtcttgttggggattttagcagggttcctgggtgcattatttaatcgtggtttaatcgccagtattaaaatttatcaaaatttacacctcagcttaccgctaaaaatggctttagctggatgtatttccggtttattagtggcaatgcttccggaatctttccgtgattatgcgggcttacgggagtacatgattatcagtgaagctaatataacttttgcggcgatcgcctttttatctcaatttctgctcaccctggtggcctttggttccggtgcgcctggggggttatttgcgccgagtctgattttgggttcttgtttaggacatctagttggtgtatccgcctcttatttcttagcagtggattcccccacaacttacgctttagctggtatgggcggtttttttagtgctgtttctaaagtaccaatcacagccatagtaattgtctttgaaatgactacagatttcaatttggtactacctttgatgattgtatctgtagctgcatacttggtttcggacaaagtaatgccgggatctttatatgacaaactattacagctaaaaggcatcacaattactaaagctgtttcccccgaaggaatattaacaaagttaacagctaacgatgtcatgcagcatcgagtcgaaactctggatgcagatatgacattagaagaagcaatgcaagtattttcccgttcccatcatcggggctttccagtggtagagaatggcaaactcatcgggattatcacacaatcggattttgtcaccaaacgcgatagtgattcctacatcctgagtaatagccagtcaccaaaggatgtctcattaagggagattatgatccactcccccataactgtcaaacccaagcatcacctcagtaatgttttgtatttgctagatcgctatcaaattagtcgcttaccagtggtggaagggcggaaattagtggggattattacccgtgcagacatcatccgcgcccaagctgaacatttgaattatggcaacgttaccccagaatcacagccggaaccttcttatgtagtttatcaaacgcgatcgcctaatattggcagaggtcgattattagtaccagtagccaatcccgaaaccgccgccattctcttgcaaatggccgcagctattgcgcgcgatcgccactatgaaatcgagtgtgtgcaaataatcttagtatcgcgtcacaattccccctcagaaacatcagtcagaaccgccaaaagtcgccgcttactacgacaagccgaagttttggctaaaaagtggaaaattcccttacacacccaaattagagtcgcccacgacccagccgaggcaatattggaaaccatccacgaacgacatataaacctgattttaatgggctggaaaggtgaaacttctacccctgggcggatttttggcaatgttgtagataccatcattcgtcaagccacctgcgacgtaatgctagtaaaactgggtaatactccccactccctactccccattccccattccccattccccactcccaaattcaaccgttggctagtcacaatggctggcggtcctaatgtcagagtagcgattaaattattacctgctttagcgacattgggggataatccatacattcggctgacgcaggtgtttaaaccatctcagttaaagccagacatgacagttttagaacaagccatccggatattaatgcgtcgccgtaaattatccagcaatgtagttgctatccccgtccaagctgattcggtggctgaaggagtgattaatctcgtgaaaaccgaaggttatgatgttgtggttttaggggcttctcgtgagggattattacagcaagcagttcaaggtaatattcccgaagcgatcgcctctggtgtagactgcacagtcatcttagtcagaggcgcgattagtagttaa

SEQ ID NO: 74 - protein, 887 aa, Nodularia spumigena
MAISGLTQRFRLWLQPTRGLAIAEACIIGLVAALSAVFLKFGSGFLGTWRVQTSQIVPALLVLPTIGLSFGFIAGSLVNRFAPEASGSGIPQVKATLANVPITLSWRVATVKLISAIITLGSGMALGRQGPTVHVGAGLAAGMSRWVPTSPDHRRQMIAAGAGAGLAAAFNAPITGVLFIVEELLQDLSGLTLGTAIIASFIGGVVSRLLGGGSLQLNLELLQYASNFTLPEIPFFVLLGILAGFLGALFNRGLIASIKIYQNLHLSLPLKMALAGCISGLLVAMLPESFRDYAGLREYMIISEANITFAAIAFLSQFLLTLVAFGSGAPGGLFAPSLILGSCLGHLVGVSASYFLAVDSPTTYALAGMGGFFSAVSKVPITAIVIVFEMTTDFNLVLPLMIVSVAAYLVSDKVMPGSLYDKLLQLKGITITKAVSPEGILTKLTANDVMQHRVETLDADMTLEEAMQVFSRSHHRGFPVVENGKLIGIITQSDFVTKRDSDSYILSNSQSPKDVSLREIMIHSPITVKPKHHLSNVLYLLDRYQISRLPVVEGRKLVGIITRADIIRAQAEHLNYGNVTPESQPEPSYVVYQTRSPNIGRGRLLVPVANPETAAILLQMAAAIARDRHYEIECVQIILVSRHNSPSETSVRTAKSRRLLRQAEVLAKKWKIPLHTQIRVAHDPAEAILETIHERHINLILMGWKGETSTPGRIFGNVVDTIIRQATCDVMLVKLGNTPHSLLPIPHSPFPTPKFNRWLVTMAGGPNVRVAIKLLPALATLGDNPYIRLTQVFKPSQLKPDMTVLEQAIRILMRRRKLSSNVVAIPVQADSVAEGVINLVKTEGYDVVVLGASREGLLQQAVQGNIPEAIASGVDCTVILVRGAISS

SEQ ID NO: 75 - DNA, 2616 bp, Microcoleus chthonoplastes
ttatgtcgcactgcgaactaaaataacggtactcttcacccgccgcgcgatcgcttccggtatattctcctgaatcatgagctgtaatagcccttcccgacttgcgcctaaaaccacgacatcgcataattggttattagcgatataaaccaccgcatcagaaacctcactggcgcgaataggaatccggcgaatccgaccctcggtttgtttctttaaaaagtcgctagcttcttctatggcggttgtatccataatcgtatcttctggatcaaagacttggcataatcgaatatcgggtggcttactacttaagggaattaacgctggcagaaattccaaagcgcgttgcgaattcggaccgcctgcgatgggaatcaaccaacgctgaaagaagggagggatataaggcggatgcatcatttcacccaatttaacgaccatcacatcacagggcgcttgtcgaatcactgcatccactaccccgccaaaaatgcgtccaggggttgaggttgagcctttccaccccatcatcatcaaattaatatgtcgctctttaatggtgtctagaatcccttgagtaatatcctgactcacccgtatttgagtgtgaacgggtatattccaatctcgtccccacttttccgcctgacgtaataaccgacgactttttgtggttgttactggcgtttctgcaggagacgtgctgcgggagacgagaatcacttgtagacattccaattcatagtcgcgatcgcgggcgatggcggcggcgagtttgactaatatgggggcggtttggggattagcgatgggaactaataaccgtcctcgtcccgtttctggcgatcgggtttgataaactacataagagggttctgattgtgatctagtctgagttgtcttactatcaagctgatccaattccgcccgaataatatcgctgcgggtaataattcccaataacttccgcccttcagtgactgggaggcgactgaggtgataacggttgagcagataaagcacatcgactaaactcgctgtcggcttcaccgttatcgggtgcgatgtcataatctctgctagaggtgtggtgccgggaaacggacaacggggcggattgccttgcatttttgtcgcctgtgtaagatctgattgactaataatccccactagcgtcccttcatctaccacaggaaacccttggtgcgtcgaacgagataccatctgcaaggcgtcatccagagtcatgtgcagcgataaggtttctacctgtcgttgcatcaaatcctctgctgttaacccaaccaatgaacccttgtctactttttgagtgggggaggtataccctctccattccaacagacgctgataaagtgagcctttggagagttgatcggcaattagataagacaccacacaggtgatcattaacggtaaaaccagattgaaatccgccgtaatctcaaatatgatcacaatcgcggttataggaaccttagatacagcactaaaaaacgcccccatccctgccaaggcgtaagtcgtcggttccccaacccctaaaaacgataatttagcaacgcccaccagataacccaaggcagaacccaaaaccagtgacgggtgaaataaacccccaggagcgcctgatccataagaaactagggtgagaaaaaagtaggttactaaagcgaggctagtgaattgccaactttctgcgcctgtaattaacaactcccgcaacccacgattattgcgaaaatccgggggtaacagagaaaccacacaaccacagattaatcccgctagccccatttttaccgccaaagagacatgaaagcggcgttgtagcgtcaatgaaaacagaatcccacgattaaataaggttgccagtaatccggctaaaagacccaggattaaataaaagggaatctccggagcagaaaaactactggttgtttgagttagttccaggttcaggtcgagactacgaccccctaaaatccgggaaatcaccgcaccgataaacgaagcgagaatcgctgttcctagcgttaagccggaaaaatcatggattaattcctcaaccacaaacaaaatacccgcgattggggtattaaaccccgccgctaaacccgccgctgaacccgccgcaatgagctggcgtcgatggctcggagaggtaggaaaccaacggctaaactgagccgctaacgctgcaccaatatgaactgtgggtccttgacgtcccagggtcagtcctgccgcgatcgctaaaatactactgacgagtttaaccagcgctacacgcaaatctagagcgatgggataccctccaagtgcggctttaatctgaggaataccactcccagaagcatcgggtgccaaatactcaaccaagaatccagacagtgctcccaataccagtccgaaagcgggtaaaactagaaagggcggaaattgttcagaagtttgaacccgccatgaaccgagccaaccaatactgtgttggagtaacacggcggatagcgcagaaaccaccccaattaaacaagcttctgcgatcgccaaacgtcgcttgggcagtaaccattgacgtatgggattgatcat

SEQ ID NO: 76 - protein, 871 aa, Microcoleus chthonoplastes
MINPIRQWLLPKRRLAIAEACLIGVVSALSAVLLQHSIGWLGSWRVQTSEQFPPFLVLPAFGLVLGALSGFLVEYLAPDASGSGIPQIKAALGGYPIALDLRVALVKLVSSILAIAAGLTLGRQGPTVHIGAALAAQFSRWFPTSPSHRRQLIAAGSAAGLAAGFNTPIAGILFVVEELIHDFSGLTLGTAILASFIGAVISRILGGRSLDLNLELTQTTSSFSAPEIPFYLILGLLAGLLATLFNRGILFSLTLQRRFHVSLAVKMGLAGLICGCVVSLLPPDFRNNRGLRELLITGAESWQFTSLALVTYFFLTLVSYGSGAPGGLFHPSLVLGSALGYLVGVAKLSFLGVGEPTTYALAGMGAFFSAVSKVPITAIVIIFEITADFNLVLPLMITCVVSYLIADQLSKGSLYQRLLEWRGYTSPTQKVDKGSLVGLTAEDLMQRQVETLSLHMTLDDALQMVSRSTHQGFPVVDEGTLVGIISQSDLTQATKMQGNPPRCPFPGTTPLAEIMTSHPITVKPTASLVDVLYLLNRYHLSRLPVTEGRKLLGIITRSDIIRAELDQLDSKTTQTRSQSEPSYVVYQTRSPETGRGRLLVPIANPQTAPILVKLAAAIARDRDYELECLQVILVSRSTSPAETPVTTTKSRRLLRQAEKWGRDWNIPVHTQIRVSQDITQGILDTIKERHINLMMMGWKGSTSTPGRIFGGVVDAVIRQAPCDVMVVKLGEMMHPPYIPPFFQRWLIPIAGGPNSQRALEFLPALIPLSSKPPDIRLCQVFDPEDTIMDTTAIEEASDFLKKQTEGRIRRIPIRASEVSDAVVYIANNQLCDVVVLGASREGLLQLMIQENIPEAIARRVKSTVILVRSAT

SEQ ID NO: 77 - DNA, 2592 bp, Nostoc punctiforme
atgttagccaggggtaaaattctctggttgaggctttcccgtcagttggttcaacccaggcgattggctttcgtggaagcttgcctgattggtctagtttctgggttagcggcagttctgttaggacaggcagtggattgggcaggcgcatggcgagtgcatctttcttaccattggtctgcctacttggtgctaccaggtattggactagcagggggacttttagctggttggctagtagagcacttcgcaccggaagcatcaggtagtggtatgtcggaagtgaaagcggtattggctcgtgtgccgatgccgttaaatctgcggattgctttggtaaagttgatcggcgctacattagtgttgggttctggaatgcctttaggacgggaagggccgactgtgcaaattggggcagccttggcaaatcaacttagtaactgggcaccgacttcaccagagcatcgtcgccaactgatcgccgcaggagctggggcaggattagctgcggcttttaatgcaccgatcgcaggtgtactatttgtagtggaagaattactccaagatgtgtcaggtatcactcttggtactgcgattttggcttctttcatcgcttcagtcatctctaggctctatggtagccacaacctggatctaaatcatctgaatttaggtcttcccgatacaactttcttcgctcaagaaatccctttctacttgattttgggagtattggcgggacttctaggcattctatttaataaaggtattcttaagagtctagcaattaaccgccgtttactacacgtgagtttaccctggcgaattggaattgctgggttagtcagtggtttggcgatcgctttattacctgctacctttcgcgatcatgctgggttgagagaaattttgcttgcgggtagtgctaactggtcatttgctgcgatcgctcttttagttcagtttatcttaattatttttacctacggctctggagcgccagggggtttactagttcccaccttagccctgggagctgcccttggttacttagtgggtgctgtcgaacacagtttactgggaatgagtgctgcaacagtctatgctcatgtcggcatggctgccttttttagcgccgtttctaaggttccaattacagcagttgtcattgtatttgagatgacaacagatttcaatctggtgctaccgctaatgattgcgtctgtggttgcctatttagtagcagaaaaaattgaccatcgatcgctctacgaccttttactagagtggaaggggattcacatcaccaaagagccaagcacagaggggcttctagcgcaactgagtgccttagatgtgatgcaacggcgtgtggaaactctctctagtcaaatgagtactgatgaagcagtgcaagcattttcccactctcaccatcgcaacttcccggttttagagaatggtaaagttgttggtattgtcactcaaaaaaatttagttaatattgcttcagaacaattaggcaaagatacaactatcggcgagattatgacaccagagccagtgacagtaacccccacggctacattggctcatgtactgcatatacttaatcgttatcatctcagctgcttacccgttacagaaaatcgcaagctcataggaattattactcgtagtgatattatccgtgtagaagcagagcgactcagtggtaattcccaacaaatagaacgtaaatcagcaccttcttatgtagtttaccaaactcgcgctccagctacaggcaaaggacgattattagtaccactttcacatcctcagacagccgagactttattggaaatggcagttgcgatcgccaaagatcgcaattacgaaatagaatgcctacaagtgattatcgttccgtctggccgcatcccatcggaaacaccagtacaaatcagcaaaagtcttcaacttttgcaacgggcaatacttttaggagagaattcgcggattcccgttcacacccagatccgagttgcccataatgttgctggagcaattttggagactgtcaaagaacgacacattgacttggtgttgatgggatggaaaggcagtacatcaactcctggtagagtttttagccgagtggtggataccataattcgacaggcaggttgtgatgttatcttggctaaattagatgataaaagatcctttgaccgttggttgttgccaatggcaggcggtcctaactccagccaagcaattaagttattacctgctctttcttctctaagtacatcgccccaaatcaagctatgtcaagttttccagcctactaactcgattcttgacacaacattattagataaatctgttcactttctgcaacgccgagttagcggtaaagtggtggctactccagttcgtgccaattctgtttctgatgctgtccttaagtgtgcagaacttgataacagtgatgtgattgttctgggagctagccgtgaaagcctactacaacaagcaattcaaggaaatattgccgagaatatttctcgcaagagtaattgtacagttatcatggtcaaaacttaa

SEQ ID NO: 78 - protein, 863 aa, Nostoc punctiforme
MLARGKILWLRLSRQLVQPRRLAFVEACLIGLVSGLAAVLLGQAVDWAGAWRVHLSYHWSAYLVLPGIGLAGGLLAGWLVEHFAPEASGSGMSEVKAVLARVPMPLNLRIALVKLIGATLVLGSGMPLGREGPTVQIGAALANQLSNWAPTSPEHRRQLIAAGAGAGLAAAFNAPIAGVLFVVEELLQDVSGITLGTAILASFIASVISRLYGSHNLDLNHLNLGLPDTTFFAQEIPFYLILGVLAGLLGILFNKGILKSLAINRRLLHVSLPWRIGIAGLVSGLAIALLPATFRDHAGLREILLAGSANWSFAAIALLVQFILIIFTYGSGAPGGLLVPTLALGAALGYLVGAVEHSLLGMSAATVYAHVGMAAFFSAVSKVPITAVVIVFEMTTDFNLVLPLMIASVVAYLVAEKIDHRSLYDLLLEWKGIHITKEPSTEGLLAQLSALDVMQRRVETLSSQMSTDEAVQAFSHSHHRNFPVLENGKVVGIVTQKNLVNIASEQLGKDTTIGEIMTPEPVTVTPTATLAHVLHILNRYHLSCLPVTENRKLIGIITRSDIIRVEAERLSGNSQQIERKSAPSYVVYQTRAPATGKGRLLVPLSHPQTAETLLEMAVAIAKDRNYEIECLQVIIVPSGRIPSETPVQISKSLQLLQRAILLGENSRIPVHTQIRVAHNVAGAILETVKERHIDLVLMGWKGSTSTPGRVFSRVVDTIIRQAGCDVILAKLDDKRSFDRWLLPMAGGPNSSQAIKLLPALSSLSTSPQIKLCQVFQPTNSILDTTLLDKSVHFLQRRVSGKVVATPVRANSVSDAVLKCAELDNSDVIVLGASRESLLQQAIQGNIAENISRKSNCTVIMVKT

SEQ ID NO: 79 - DNA, 2592 bp, Nostoc punctiforme
ttaagttttgaccataataactgtgcaattactcttgcgagaaatattttctgcaatatttccttgaattacctgttgtagtagactttcacggctagctcccaaaacaataacatcactgttgtcttgctgggcgcattcaagtacagcctcagaaacagaattggcttggactggagtcgccaccactttacctttaactcggcgttggagaaagtgaacagatttatctagtaatgttgtgtcaggtagagacttagtaggctggaatatttgacatagattgatttggggggatttacttaaggaagcaagagcaggtaataaccgaattgcttggctggagttaggaccacctgccattggcaacaaccaacggtcaaaagctcttttatcatccaatttggccaagacaacatcacaacctgcctgtcgaattatggtatctaccactcggctgaaaactctaccaggagttgatgtagtacctttccatcccattaataccaaatcgatatgtcgatctttgacagtctccaaaattgctccagcgacattatgggtaactcggatctgggtgtgaacgggaatccgccacttttctcctaacagtattgctttctgtaaaagctcaaggcttttggtaatttgtactggtgtttcagatgggatacggttagatggaacaataattacttgtaggcattctatttcgtaattgttagctttagcgatcgccccagccatttccaataaagtctcggctgtctgtggatgcgaaagtggtactagtaaccttcctttgcctgtagccggagcgcgagtttggtaaatcacataagaagttgctgatttcgattctatctgttgggtgttaccattcaacctctctgcttctacacggataatatcactacgagtaataattcctactagcttccgaccttctgtaacaggcaagcagctgaggtgataacgattgagtatatgcagcacataagccagcgtcgctgtgggactcgctgttactggctctggtgtcataatctggctgatagttgtatttccacttaactgttgcgaggcaagattaactaaatctttctgagtgacaatgccaacaactttacctttttctaaaattgggaagttgcgatgatgagagtcggaaaatgcctgcactgcctcatcaatactcatctggctagatagggtttcgacacgtcgctgcattacatctgcggcacttatttgtgctaaaatcccctctgtgcctggctcttttgtaatgtgaatccctttccactctagtagaaggtcatagagcgatcgcgggtcaattttttctgctactaaataagcaatcacagatacaatcattaacggtagcaccagattgaaatctgtcgtcatctcaaagacaatgacaactgctgtaatcggcactttagagacggcgctaaaaagtgcagccattcccacatgagcgtaggttgttgcagcactcattcccagcaaactctgttcggcagcaccaactaagtagccaagagcagcgcccaagaccaatgtgggaaccagcaaaccccctggcgctcctgagccgtaggttaaaataattagggtaaattggactaaaagagcgatcgctgcaaatagccaattcccactacctacaagcaaaatttctctcagcccagcattattgcgaaaggtgataggtaacagagcgatcgcaacaccagttactaaccccacaattccaattcgccagggtaaactcagatttagtaaacgccgattaattgccagacttgcaagaatacttttattaaacagaatgcctattagcccacctagcacccccaaaatcaagtagaaagggatttcctgagcgaagaaagtggtatgtgaaaagcttaaatccagatgattcagatccaagctgtgactaccatacaaccgggagatgactgaagcgatgaaagaagccaaaatcgcagtgccaagagtgatacctgacacatcttggagtaattcttccactacaaacaggacacctgcgatcggtgcattaaaagccgctgctaatccagccccggctccagcggcgatcagttggcggcgatgctctggtgaagtcggtacccaattactaagttgatttgccaaagctgccccaatttggacagttggcccttcccgtcctaaaggcattccagaacccagcactagtgtagcgctgaccagcttgaccagagcgattcgcagatttaatggcatcggcacacgagccaatacggctttgacttcagacatcccactacctgatgcttcaggtgcgaagcgctctactagccaaccagctaagattccccctaccagtccaatacctggtagtaccaagtaggcaggccagatgtaagaaagatgcactcgccatgctcccgcccagtctaccgcctgtcctaacagaactgctgctagcccagaaactaaaccaattatgcaagcttcaacgaaagccaagcgccttggtcgaagcagctgacgggaaagcctcaaccacagaatttttccccttgctaacat

SEQ ID NO: 80 - protein, 863 aa, Nostoc punctiforme
MLARGKILWLRLSRQLLRPRRLAFVEACIIGLVSGLAAVLLGQAVDWAGAWRVHLSYIWPAYLVLPGIGLVGGILAGWLVERFAPEASGSGMSEVKAVLARVPMPLNLRIALVKLVSATLVLGSGMPLGREGPTVQIGAALANQLSNWVPTSPEHRRQLIAAGAGAGLAAAFNAPIAGVLFVVEELLQDVSGITLGTAILASFIASVISRLYGSHSLDLNHLDLSFSHTTFFAQEIPFYLILGVLGGLIGILFNKSILASLAINRRLLNLSLPWRIGIVGLVTGVAIALLPITFRNNAGLREILLVGSGNWLFAAIALLVQFTLIILTYGSGAPGGLLVPTLVLGAALGYLVGAAEQSLLGMSAATTYAHVGMAALFSAVSKVPITAVVIVFEMTTDFNLVLPLMIVSVIAYLVAEKIDPRSLYDLLLEWKGIHITKEPGTEGILAQISAADVMQRRVETLSSQMSIDEAVQAFSDSHHRNFPILEKGKVVGIVTQKDLVNLASQQLSGNTTISQIMTPEPVTASPTATLAYVLHILNRYHLSCLPVTEGRKLVGIITRSDIIRVEAERLNGNTQQIESKSATSYVIYQTRAPATGKGRLLVPLSHPQTAETLLEMAGAIAKANNYEIECLQVIIVPSNRIPSETPVQITKSLELLQKAILLGEKWRIPVHTQIRVTHNVAGAILETVKDRHIDLVLMGWKGTTSTPGRVFSRVVDTIIRQAGCDVVLAKLDDKRAFDRWLLPMAGGPNSSQAIRLLPALASLSKSPQINLCQIFQPTKSLPDTTLLDKSVHFLQRRVKGKVVATPVQANSVSEAVLECAQQDNSDVIVLGASRESLLQQVIQGNIAENISRKSNCTVIMVKT

SEQ ID NO: 81 - DNA, 2589 bp, Anabaena variabilis
atgtactttcgcagttggttgcagcctagacggggtttagcgatcgccgaagcttgtgttattggggttttagctgcattatctgcggtattcctcaaggtttgttcgggattattaggtgcatggcgggttcatagttctcatgttttgcctgcatgggtagttttaccaatcatcggtttgggctttgggtatttggctggtctgatggtgcaaagattagcaccagaggcggcgggtagtggtatcccccaagtcaaggctaccctggcaaatataccgatgaaattgtcttggcgggtagcggtgattaagctactgagtgccattattgctttaggttctggcatcacattaggaagacaagggccgacagtccaagtaggggcaggtttagcgtcggggatgagtcgcttggttcccacttctcctgaccatcggcggcaaatgattgcggctggtgcgggtgcaggtttggcggctgcttttaatgctcccattgccggggtattattcattattgaggaattacttcaagatttatcgggattgactctgggaactgccattatcgcttcatttattggcggggtagtgtcccggttgttgggtggtcgcagtctaaatttaaatatagaattactttcctactccagccggtttacttttccagaaattcccttctttttgcttttgggtgttttagcggggttactgggtgcattatttaatcgtggcttgatttttagcctccagttttatcggagtctgcatattagtttacctttgcgggtcggtttggctgggttggtttcggggattgtcgtatcgctgttacctgagtcgtttcgggataatgctggtttaagggaatatgtaattactggtgatttaaatccaagctttgcagcgatcgcttttgttgctcagtttaccctaactttagtcgcatttggttctggcgcacccggaggtttatttgcgcctagcttaattttgggttcggctttaggacatttggtcggtgtattagagtatcaaatcactggtgatggttctcctgtgacttacgccttagcggggatgggaggtttttttagtgccgtttctaaagtaccaatcactgccattgtgattatctttgaaatgaccacagattttaatttagtgttgcctttgatgatagtgtctgtgacggcttacttggtagcagacaaagtagtacccggttcactgtatgagaaattattactgttgaatggcattaccctcactaaacagatgtcggtagaggggatattaagccaaatgactgcaaaagatgtgatgcagcaacgggtagaaactttagatgcagatattacccttgaagaagccaagcaagcctttgctagttcccaccatcgcggcttcccggtagtggaagataacaaattagtcgggattattacccaatcagatttaactaaaagcctcagccgcaatctagagaatcatcctcacctcagggaaatcatgaccgccaatcccatgacagtcacacccatacataccctgagtaatgttttatatttgctagaccgctatcaaatcagtcgcctaccagtagtagacgggcaaaaactcatcgggattatcacccgtgcagatatcattcgggtagaagcagaccgtctcaactgcgaaaaccccaacccaggcccccaaccggaaccatcctatgtagtttaccaaacgcggagtcccagcactggcagaggtagaatactagtcccagtagccaacccagaaaccgccgcaactctattaaaaatggcagctgccattgcccgcgatcgccattatgaaatagagtgtgtacaagtgatgctggtttctcgtcacagttccccttcagaaaccaccgtcagaaccgccaaaagtcgtcgccttctgcgacaagccgaagtattagccaaaaaatggcgcattcctctacacacccaaattagggtcgcccatgatcctgctcacgccattttagaaaccatcaaagaccgacacatagatttaattctcatgggatggaaaggcagcacatctaccccaggcaggatttttggcaatgttgtagacaccatcatccgccaagccacctgtgacgtagtactagtgaagttaggtacttccccaatccccaatcccccattcaatcgctggctagtcccaatggctggcggccctaacgccagaatagccattaaattattaccggctttagttactttaagcgatgacccacaaatccgcttgacaagggtgtttaaaccttgggaatttagaccagatatgacagttttagaacaagccattcgtcaattgatgcgtcgccgccaactatctagtactgtaattgctgcgccggtacaagctgattcagtagtcgaaggtgtgattaagttagtgaaaaccgaaggttatgatgtggtggttttaggcgcttcccgtgaaggtttattacaacaggctattcaaggtaatattccagaggcgatcgcttctggtgttgatattaccgtaattttggtaaggggagcaattgaaagttag

SEQ ID NO: 82 - protein, 862 aa, Anabaena variabilis
MYFRSWLQPRRGLAIAEACVIGVLAALSAVFLKVCSGLLGAWRVHSSHVLPAWVVLPIIGLGFGYLAGLMVQRLAPEAAGSGIPQVKATLANIPMKLSWRVAVIKLLSAIIALGSGITLGRQGPTVQVGAGLASGMSRLVPTSPDHRRQMIAAGAGAGLAAAFNAPIAGVLFIIEELLQDLSGLTLGTAIIASFIGGVVSRLLGGRSLNLNIELLSYSSRFTFPEIPFFLLLGVLAGLLGALFNRGLIFSLQFYRSLHISLPLRVGLAGLVSGIVVSLLPESFRDNAGLREYVITGDLNPSFAAIAFVAQFTLTLVAFGSGAPGGLFAPSLILGSALGHLVGVLEYQITGDGSPVTYALAGMGGFFSAVSKVPITAIVIIFEMTTDFNLVLPLMIVSVTAYLVADKVVPGSLYEKLLLLNGITLTKQMSVEGILSQMTAKDVMQQRVETLDADITLEEAKQAFASSHHRGFPVVEDNKLVGIITQSDLTKSLSRNLENHPHLREIMTANPMTVTPIHTLSNVLYLLDRYQISRLPVVDGQKLIGIITRADIIRVEADRLNCENPNPGPQPEPSYVVYQTRSPSTGRGRILVPVANPETAATLLKMAAAIARDRHYEIECVQVMLVSRHSSPSETTVRTAKSRRLLRQAEVLAKKWRIPLHTQIRVAHDPAHAILETIKDRHIDLILMGWKGSTSTPGRIFGNVVDTIIRQATCDVVLVKLGTSPIPNPPFNRWLVPMAGGPNARIAIKLLPALVTLSDDPQIRLTRVFKPWEFRPDMTVLEQAIRQLMRRRQLSSTVIAAPVQADSVVEGVIKLVKTEGYDVVVLGASREGLLQQAIQGNIPEAIASGVDITVILVRGAIES

SEQ ID NO: 83 - DNA, 2616 bp, Nostoc sp.
atgtactttcgcagttggttgcagcctagacggggtttagcgatcgcagaagcttgtgttattggggttttagctgcattatctgcggtattcctcaaggtctgttcgggattattaggtgcatggcgggttcatagttctcatattttgccggcatgggtagttttaccaatcattggtttgagctttgggtatttggctgggctgatggtgcaaagattagcaccagaggcggcgggtagtggtattccacaagtcaaagctactctagcaaatataccgatgaaattgtcttggcgagtagcaatagttaagctactgagtgctattctggctttgggttcagggctgacattaggaagacaagggccgacagtccaagtgggggcaggtttagcggcggggatgagtcgcttggttcccacttctcccgaccatcggcggcaaatgattgcggctggtgcgggtgcaggtttggcggctgcttttaatgcccctattgccggggtcttatttattattgaggaattacttcaagatttatcagggctgactctgggaactgccattatcgcttcatttattggtggggtagtttcccggctattgggtggtcgtagtctaaatttaaacatagaattactttcctactctagtggcttttcttttccagaaattcccttctttttgctgttgggtgtcttagcagggttactgggtgcattatttaatcgcgggttgattttcagcctccagttttaccggaatctgcatattagcttacctctgcgggtagccttggctggtttggtatcggggattgtcgtatcgctgttgcctgagtcttttcgggataacgctggtttaagggaatatgtaatcactggtgatttaaacccatcctttgcagcgatcgcttttattgctcagtttatcctaactttagtcgcatttggttctggcgcacccggaggtttatttgcgcctagcctaattttaggttcggctttagggcatttggtgggcgtattagagtatcaaatcacgggggatggttctcctgttacctatgccttagcgggaatgggtggtttttttagtgcggtttctaaagtcccaatcaccgctattgtgattgtctttgaaatgaccacagactttaacctagtgttgcctttgatgatagtgtctgtgacggcttacttagtagcagacaaagtagtacctggttcactgtatgagaaattattacttttaaatggcattaccctcactaaacagatgtcggtagaggggatattaagccaaatgactgcaaaagatgtgatgcagcaacgggtagaaactctagatgcagagataactttagaagaagccaagcaagcctttgctagttcccaccatcgcggcttcccagtagtagaagataacaaattagtcgggattattactcaatcagatttaactaaaagcctcagtcgcagtctagagaataatcctcacctcagggaaattatgacagccaatcctatgacagtcacacccatacataccttgagtaatgttttatatttattagaccgctatcaaatcagtcgcttaccagttgtagaagggcaaaaactgatcgggattattacccgtgcagatatcattcgggtagaagcagaccgtctcaactgcgaaaatcccaacccagggccccagccagaaccatcctatgtagtttaccaaacgcgaagtcccaacacaggcagaggtagaatactagtaccagtcgccaacccagaaaccgccgcgactttattaaaaatggcagccgccattgcccgcgatcgccattatgaaatagagtgtgtacaagtaatgctggtttcccgccacagttccccatcggaaaccacggtgagaaccgccaaaagtcgccgtcttctgagacaagccgaagtcttagccaaaaaatggcgcattcccctacatacccaaattagagtcgcccatgatcctgctcatgcaattttagaaaccattaaagaccgacacatagacttaattctcatgggatggaaaggtagcacatccaccccaggcaggatttttggcaacgttgtagataccatcatccgccaagccacctgtgacgtagtgctggtgaagttaggtagttccccattcccaatccccaatacccaatacccaatctccaatccccaattcaatcgctggctagtaccaatggctggtggccccaacgccaggatagcaattaaactgttaccagctttagtgactttaagcgatgacccacaaattcggttgacaagggtgtttaaaccttgggaatttagaccagatatgacagttttagaacaagccattcgtcaattgatgcgtcgccgccaactatctagtactgtaattgctgcgccagtacaagctgattcagtagtcgaaggtgtgattaagctagtggaaactgaaggttatgatgtggtggttttaggcgcttcccgtgagggcttattacaacaggctattcaaggtaatattccagaggcgatcgcttctggtgtcgatagtaccgtgattttggtaaggggagcaattgagagttga

SEQ ID NO: 84 - protein, 871 aa, Nostoc sp.
MYFRSWLQPRRGLAIAEACVIGVLAALSAVFLKVCSGLLGAWRVHSSHILPAWVVLPIIGLSFGYLAGLMVQRLAPEAAGSGIPQVKATLANIPMKLSWRVAIVKLLSAILALGSGLTLGRQGPTVQVGAGLAAGMSRLVPTSPDHRRQMIAAGAGAGLAAAFNAPIAGVLFIIEELLQDLSGLTLGTAIIASFIGGVVSRLLGGRSLNLNIELLSYSSGFSFPEIPFFLLLGVLAGLLGALFNRGLIFSLQFYRNLHISLPLRVALAGLVSGIVVSLLPESFRDNAGLREYVITGDLNPSFAAIAFIAQFILTLVAFGSGAPGGLFAPSLILGSALGHLVGVLEYQITGDGSPVTYALAGMGGFFSAVSKVPITAIVIVFEMTTDFNLVLPLMIVSVTAYLVADKVVPGSLYEKLLLLNGITLTKQMSVEGILSQMTAKDVMQQRVETLDAEITLEEAKQAFASSHHRGFPVVEDNKLVGIITQSDLTKSLSRSLENNPHLREIMTANPMTVTPIHTLSNVLYLLDRYQISRLPVVEGQKLIGIITRADIIRVEADRLNCENPNPGPQPEPSYVVYQTRSPNTGRGRILVPVANPETAATLLKMAAAIARDRHYEIECVQVMLVSRHSSPSETTVRTAKSRRLLRQAEVLAKKWRIPLHTQIRVAHDPAHAILETIKDRHIDLILMGWKGSTSTPGRIFGNVVDTIIRQATCDVVLVKLGSSPFPIPNTQYPISNPQFNRWLVPMAGGPNARIAIKLLPALVTLSDDPQIRLTRVFKPWEFRPDMTVLEQAIRQLMRRRQLSSTVIAAPVQADSVVEGVIKLVETEGYDVVVLGASREGLLQQAIQGNIPEAIASGVDSTVILVRGAIES

SEQ ID NO: 85 - DNA, 2592 bp, Nostoc azollae
atgttagccaggagtaaaattttttggttgaggctttcccgtcagctggttaaaccgaggcgcttggctttcgtggaagcttgcgtgattggtctagtttctgggttagcggcagttctgttaggacaggcagtggattgggcaggcgcattacgagtgcgtgtttcttaccattgtcctgcctacttagtactaccgagtattggactagtaggaggaatcttagctggttggctagtcgagtgctttgcaccggaagcatcaggtagtggaatgtctgaagtgaaagcagtattggctcgggtaccgatgccgttaaatctgcggattgctttggtcaagttgatcagcgctacgttagtgttgggttcgggaatgcctttgggacgggaagggccaactgtccaaattggggcagccttggcaaatcaatttagtaactgggctccgacttcaccagagcatcgtcgccaattgatcgccgctggagcgggggcgggattagctgcggcttttaatgcacctatcgcaggtgtgctttttgtagtggaagaattactgcaagatgtgtcaggtatcactcttgggactgcgattttggcttctttcatcgcttcagtcatttcccggctttatggtagtcacaaccttgatctgaatcatctaaatttaggtcttcccgatacaactttctttgcgcaggaaatcccattctacttgattttaggagttctggcggggtttataggcattctatttaataaaggtattctcgagagtctagcaattaaccgccgaatggtaaggttgagtttatcctggcgaattggaatcgctgggttagttagtggtgtggtgatcgctttattacctgctacctttcgcgatcatgctgggttgagagaaattttgcttgcaggtaatactaactggtcatttgcagcgatcgctcttttagttcagtttatcctaattatttttacctacggttctggagcgccagggggtttactagttcccaccttagtcttgggatctgcccttggttacttagtcggtgctatcgaacacagtttactgggaatgagtgctgcggcagtctatgctcatgtgggtatggctgctttttttagcgctgtatctaaggttccaattacggcagttgtcattgtatttgagatgacaacagattttaacctggtactaccgctaatgattgcttctgtggttgcctacttagtagcagaaaaaattgaccatcgatctctctacgaccttttactagagtggaaaggaattcatataaccaaggagccaagcagagaggtgcttctggcacaactcagtgccgtagatgtaatgcaacggcgtttggaaaccctctctagccagatgagtactgatgaagcggtacaggcattttcccactctcaccatcgcaacttcccagttttagagaatggtaaagttgttggtattgttactcaggaagatttagttaatattgcttcgcaaaagttaagtggagatacaactattagcgagattatgacaccagagccagtgacagtaactcccacagcgacactggctcatgtactacatatacttaatcgttatcatctcagctgcttgcttgttacagaaggtcgcaagcttataggaattattactcgtagtgatattatccgtgtagaagcagagcgacttagtggtaatagcgaacaaatggaacgtaaattagcaccttcttatgtggtttaccaaagtcgcgctccggctacaggcaaaggaagattgttagtaccgctttcacatccacagacagccgagactttactagaaatggcagttgcgattgccaaagatcgcaattacgaaatagaatccctacaagtgattattgttccgtctagccgtattccatcggaaacaccagtacaaatcagcaaaagtcttcaacttttgcaacgggcaatacttttaggagagaattcgcggattcccgttcacaccgagattcgagttgctcataatgttgctggggcaattttggagactgtcaaggaacgacacattgacttggtactgatgggatggaaaggcagtacatcaactcctggtagagtttttagccgagtcgtggataccataattcgacaggcaggttgtgatgttatcttggctaaattagatgataaaagatcctttgaccgttggttattgccaatagcaggtggacccaactccagccaagcaattaagttattacctgcgctttcttctttaagtaggtcatcccaaatcaatctatgtcaagttttccagcctaataactctattcccgatacaactttattagataaatccgttaactttctgcaatgccgagttagtggtaaagtagtggctaccccaattcgtgctaattctgtttctgatgctgtcctccagtgtgcagaacaagataagagtgatgtaattgttctgggagctagttgtgagagtttactacaacaagcgattcaaggaaatattgctgaaaatatttctcgtaagagtaattgtacagttatcatggtcaaaacttaa

SEQ ID NO: 86 - protein, 863 aa, Nostoc azollae
MLARSKIFWLRLSRQLVKPRRLAFVEACVIGLVSGLAAVLLGQAVDWAGALRVRVSYHCPAYLVLPSIGLVGGILAGWLVECFAPEASGSGMSEVKAVLARVPMPLNLRIALVKLISATLVLGSGMPLGREGPTVQIGAALANQFSNWAPTSPEHRRQLIAAGAGAGLAAAFNAPIAGVLFVVEELLQDVSGITLGTAILASFIASVISRLYGSHNLDLNHLNLGLPDTTFFAQEIPFYLILGVLAGFIGILFNKGILESLAINRRMVRLSLSWRIGIAGLVSGVVIALLPATFRDHAGLREILLAGNTNWSFAAIALLVQFILIIFTYGSGAPGGLLVPTLVLGSALGYLVGAIEHSLLGMSAAAVYAHVGMAAFFSAVSKVPITAVVIVFEMTTDFNLVLPLMIASVVAYLVAEKIDHRSLYDLLLEWKGIHITKEPSREVLLAQLSAVDVMQRRLETLSSQMSTDEAVQAFSHSHHRNFPVLENGKVVGIVTQEDLVNIASQKLSGDTTISEIMTPEPVTVTPTATLAHVLHILNRYHLSCLLVTEGRKLIGIITRSDIIRVEAERLSGNSEQMERKLAPSYVVYQSRAPATGKGRLLVPLSHPQTAETLLEMAVAIAKDRNYEIESLQVIIVPSSRIPSETPVQISKSLQLLQRAILLGENSRIPVHTEIRVAHNVAGAILETVKERHIDLVLMGWKGSTSTPGRVFSRVVDTIIRQAGCDVILAKLDDKRSFDRWLLPIAGGPNSSQAIKLLPALSSLSRSSQINLCQVFQPNNSIPDTTLLDKSVNFLQCRVSGKVVATPIRANSVSDAVLQCAEQDKSDVIVLGASCESLLQQAIQGNIAENISRKSNCTVIMVKT

SEQ ID NO: 87 - DNA, 2592 bp, Nostoc punctiforme; identical to SEQ ID NO: 79

SEQ ID NO: 88 - protein, 863 aa, Nostoc punctiforme; identical to SEQ ID NO: 80

SEQ ID NO: 89 - DNA, 2589 bp, Anabaena variabilis; identical to SEQ ID NO: 81

SEQ ID NO: 90 - protein, 862 aa, Anabaena variabilis; identical to SEQ ID NO: 82

SEQ ID NO: 91 - DNA, 2616 bp, Nostoc sp.; identical to SEQ ID NO: 83

SEQ ID NO: 92 - protein, 871 aa, Nostoc sp.; identical to SEQ ID NO: 84

SEQ ID NO: 93 - DNA, 2592 bp, Nostoc azollae; identical to SEQ ID NO: 85

SEQ ID NO: 94 - protein, 863 aa, Nostoc azollae; identical to SEQ ID NO: 86

SEQ ID NO: 95 - DNA, 2652 bp, Nostoc punctiforme
tcacttgtgaattgcacccctgaccaaaatcactgtactttctacaccagaggcgatcgcttcgggaatattaccttgaatcgcctgctgcaacaatccctcgcgggaagctcccaaaactacaacatcgtaaccctcggttttcactaggttaatcacaccttcagctactgaatcagcttgcactgggatcgcaactacagtactagataattttcgccgccgcatcaactgacggatggcttgttctgaaattgacatatctggcttgagttcagatggattaaacacctgtgtcaagcgaatttgcggatcgtttcccaatgtaattaaagcaggtaacaacttaatcgctaggggagaattgggaccgccagccattggaactagccagcgattgaaagaatgctgagtctggagtgctgtttgcggatagctatgatttggcttgtgctgagttttgcccaattttaccaaaactacttcgcaggtggcttggcgaattatgttgtctacaacgctgccaaaaatccgaccaggggtagatgtgttacctttccatcccattaaaattaggtcgatgtgttgttcgttgattgtctctaaaattgcttgggcgacatcgtgggtaactcgaatctgcgtatgcaaggggattttccacttttttgctaagacttctgcctgtcttagcaagcggcgactttttgccgttcttacctgtgtttctgatggagaactgtggcggggtatcagcataacttgcacgcaatctatttcataatggcgatcgcgggcaatagctgctgccatttgtaataaaatacctgcagtatcgggattagctactggtactaataatctacctctaccgatgttgggcgatcgcgtttggtaaactatgtatgaaggttctggttgcagcttaggagttccatttccacaattgagatgatctgcttccgcccgaataatatctgcacgggtaataatcccgataagtttccgtccatttaccactggtaagcgactgatttgatagcgatcgagtaaatacaacacattgcccagagtgtgagtcggtgttaccgtcatcgggacagttgtcataatttcttttaagaaaatatcggctaaattgcgatcgcgaaatgtgtggtttgtactctcgcgtattttcaacaaatctgattgcgtcacaatccctactaacttgctatcctctaccacaggaaaaccgcgatgatgggaacgagcaaaggactgcattgcttcttctaagctcatctctgcatccagagtttccactcgttcttgcatcacatcttttgcagttaacttggttaatgctccctccatcggaacttgtttggtgagagtaataccttttaactccaaaagtttctcataaagcgaacctgatactaccttatccgcaaccagataagctgctacagaaacaatcattaaaggtagtaccagattgaaatctgtagtcatttcaaacacaatcacaattgctgtgattggcactttggaaacggcgctaaaaaatccacccatccccgctagggcgtaagtagtcggagaaccaactccagtgatatataactcagctacaccgatgatatgtcctaaacaagaacccaaaatcagactgggagcgaataacccccccggcgctcctgaaccaaatgctataagtgtgaggatgaattgggcggtaaaggcgatcgctgctactgtaggatgggaacctccagtaattaaggattctcgtaaccccgtattatcccggaacgatggagggagcatagccacgacaacaccagaaataaatccagctaaagccactcgcaacggtaagctgatatgtaatcttctataaaatttaatactaaatattaagccgctattaaacaatgcacccagcaaccctgccaagatgcctaacagtacgaaaaagggaatttctgggatagaaaattggctggaagattgcgttaattgcaggttaaggtcaaaagagccaccacctaagagtcgggatatcaccccaccaataaaggaggcgataatggcagttcccagggtcaatcctgataaatcttggagtaactcctcaacgataaacaatacacctgcgatcggggcattgaaagcagcagccaaacccgcacctgcaccggctgcaatcatttgccgtcgatgatctggggaagtgggaacccaacgactcatccctgctgctaaacctgcccccacttggacagtagggccttgccgtcctagagtcatgcctgaaccaatggcgatgatagcactgagtaacttcacacctgctacccgccaggataaattcacaggtacattggcaagactagctttaacttgcggaataccgctaccataagcctctggtgccaatctatccaccaaccatccagctataaatcccagaacaagaccaattacaggtagtaccagccatgccggaaaaaggtgggtagtatgtactcgccatgtccccagccatcccgatcctactttcaggaataccgcagatagggcagcaaccaaaccgataacacaagcttcggcgatcgctaaacctcttctaggctgccaccaggtgcgaaaacgctgattcat

SEQ ID NO: 96 - protein, 883 aa, Nostoc punctiforme
MNQRFRTWWQPRRGLAIAEACVIGLVAALSAVFLKVGSGWLGTWRVHTTHLFPAWLVLPVIGLVLGFIAGWLVDRLAPEAYGSGIPQVKASLANVPVNLSWRVAGVKLLSAIIAIGSGMTLGRQGPTVQVGAGLAAGMSRWVPTSPDHRRQMIAAGAGAGLAAAFNAPIAGVLFIVEELLQDLSGLTLGTAIIASFIGGVISRLLGGGSFDLNLQLTQSSSQFSIPEIPFFVLLGILAGLLGALFNSGLIFSIKFYRRLHISLPLRVALAGFISGVVVAMLPPSFRDNTGLRESLITGGSHPTVAAIAFTAQFILTLIAFGSGAPGGLFAPSLILGSCLGHIIGVAELYITGVGSPTTYALAGMGGFFSAVSKVPITAIVIVFEMTTDFNLVLPLMIVSVAAYLVADKVVSGSLYEKLLELKGITLTKQVPMEGALTKLTAKDVMQERVETLDAEMSLEEAMQSFARSHHRGFPVVEDSKLVGIVTQSDLLKIRESTNHTFRDRNLADIFLKEIMTTVPMTVTPTHTLGNVLYLLDRYQISRLPVVNGRKLIGIITRADIIRAEADHLNCGNGTPKLQPEPSYIVYQTRSPNIGRGRLLVPVANPDTAGILLQMAAAIARDRHYEIDCVQVMLIPRHSSPSETQVRTAKSRRLLRQAEVLAKKWKIPLHTQIRVTHDVAQAILETINEQHIDLILMGWKGNTSTPGRIFGSVVDNIIRQATCEVVLVKLGKTQHKPNHSYPQTALQTQHSFNRWLVPMAGGPNSPLAIKLLPALITLGNDPQIRLTQVFNPSELKPDMSISEQAIRQLMRRRKLSSTVVAIPVQADSVAEGVINLVKTEGYDVVVLGASREGLLQQAIQGNIPEAIASGVESTVILVRGAIHK

SEQ ID NO: 97 - DNA, 2580 bp, Nostoc azollae
ttaagaattaatttcccctctgactaaaatcactgtactttcaacaccagaagcaatagtttcgggaatattaccttgaattgtctgttgtaataatccctcacgagaagcgcccaaaactacaacatcatagcgttctgtttgcactaaattaatgactccttcacaaacagaatttgcttgtactggtgcagcaacaactgtactttgtaaattgcggtgacgcattagttgatgagtggattcttctaaaactgttatatctggctttaattccgatggtttaaatacctgagtgagatgaatttgggtattatttcccaatgttactaaagccggtaataatttaacggctttagtaacattgggtcctccagccatagggactaaccaacggttgaaatggttagagtcagaaatattaccaaattttactaagacaacatcacaggctgcttgacgaatgatagtatctacaacattaccaaaaatacgtcctggagtagaagtattacctttccaacccataaaaattaggtcaatgtgtcgttcattgattgtctccaaaattgcctgggcgatatcatgggcgactcgaatctgcgtatggatgggaatatgccatttttttgctaaagctttcgcttgcctgagtaaacggcgactttttgtggtgttgacttgggtttcggacggggaactatgacgggagatgaggattatttgtaagcactctagttcataatggcgatcgcgggcaatagttgcagccatttgtaaaagagtttcggctgtatctggatttgcgactgtaactaataatctacctctaccaatgttaggcgatctcgtttggtaaactacataagaaggttctggttggggtccagaaactccgttttcacaattaagatgatctgcttcagccggaataatatctgcgcgagtaataatcccgaccaatttttgtctttccaccactggtaaacgactgatttgataacggtcaagtaaataaagcacattacttagagtttgtttaggagtaactgtgacaggctggggtctcatgatttctcttaaaggagtatcccgactcacaggtattttctgtaaatctgattcagtaacaactcctaccaatttacagttttctaccaccggaaaaccccgatgatgagaacgagaaaatgcttgaataacttcatcaacagacatctgtgtttctagagtttccacccgttcttgcattacatcttgggctgttaattgagttaagactccttctctggttgcatcttttttgatgccatttaatagtaaaagtttgtcatacagtgaaccaggtactagctgatctgcaactaaatatgatattacagaaacaatcatcaaaggtaacaccagattgaaatcagtagtcatttcaaacacaattacaatagctgtaattggtactttagaaaccgcactaaaaaagccccccattccagctaaagcgtaggtagtaggacaacctaaaccccacagttgaaactcacacactcctaccaagtgtcctaaacaagaacctaaaatcaaactgggtgcaaataatccaccaggtgcgccagaaccaaaggcgattaaggttaaaataaattgagcaatcaaagtaattgcagcaaagctgggattaggttgactggcaatcatatattcccgtaaacctgtattgtcacggtaatattcagggagagcagagacaattaaaccacaaaataaaccagttcgagccactcgtagtggtaaacttatatgtaatccgcgataagttttaacactaaaaattaagcccagattaaatattgcacctagtagacctgcgaaaatacccaatagtaaaaagatcggaatttccaacaatgagaaactactaaaatattccattgattgcaggtttaattgcaaacttccaccacctaacaaccgggaaattaccccaccgataaaacaggcgataatggcagttcctaaagttagtcctgataaatcttgcagtaactcttcaataataaataatacccccgcaattggggcgttaaaagcagccgataaacctgcacctgcaccggcagcaatcatttgtcggcgatgttctggagaggtgggaaaagtgcgactcattcccgctgctaaacttgcaccgatttgaactgtggggccttgtcttcctaaagttatacccgaacccaaggagatgattgtgctgagtaattttataccttccacccgccaggataacttgattggtatattggcaagactggctttaacttgaggaataccactacctgcggcttctggtgctaacctttgtaccaaccaaccagctaaaaacccaaaactcatgccaattaacggtaaaatgagccaagcaggtacaaattgggtactatgaactcgccatgtacccaagcatcctgaaccttgtttcagtaaaacagcagataaagcagcaactatgccgatcatcgaagcttcggcattagcatatcccattgaccaaaaagggagacgcaagcccctagctttagacat

SEQ ID NO: 98 - protein, 859 aa, Nostoc azollae
MSKARGLRLPFWSMGYANAEASMIGIVAALSAVLLKQGSGCLGTWRVHSTQFVPAWLILPLIGMSFGFLAGWLVQRLAPEAAGSGIPQVKASLANIPIKLSWRVEGIKLLSTIISLGSGITLGRQGPTVQIGASLAAGMSRTFPTSPEHRRQMIAAGAGAGLSAAFNAPIAGVLFIIEELLQDLSGLTLGTAIIACFIGGVISRLLGGGSLQLNLQSMEYFSSFSLLEIPIFLLLGIFAGLLGAIFNLGLIFSVKTYRGLHISLPLRVARTGLFCGLIVSALPEYYRDNTGLREYMIASQPNPSFAAITLIAQFILTLIAFGSGAPGGLFAPSLILGSCLGHLVGVCEFQLWGLGCPTTYALAGMGGFFSAVSKVPITAIVIVFEMTTDFNLVLPLMIVSVISYLVADQLVPGSLYDKLLLLNGIKKDATREGVLTQLTAQDVMQERVETLETQMSVDEVIQAFSRSHHRGFPVVENCKLVGVVTESDLQKIPVSRDTPLREIMRPQPVTVTPKQTLSNVLYLLDRYQISRLPVVERQKLVGIITRADIIPAEADHLNCENGVSGPQPEPSYVVYQTRSPNIGRGRLLVTVANPDTAETLLQMAATIARDRHYELECLQIILISRHSSPSETQVNTTKSRRLLRQAKALAKKWHIPIHTQIRVAHDIAQAILETINERHIDLIFMGWKGNTSTPGRIFGNVVDTIIRQAACDVVLVKFGNISDSNHFNRWLVPMAGGPNVTKAVKLLPALVTLGNNTQIHLTQVFKPSELKPDITVLEESTHQLMRHRNLQSTVVAAPVQANSVCEGVINLVQTERYDVVVLGASREGLLQQTIQGNIPETIASGVESTVILVRGEINS

SEQ ID NO: 99 - DNA, 2703 bp, Lyngbya sp.
atgttgcgaatttctattcccgagcaactttcaaaacggttcaaaataatcgcgactcaaatcctacaacctcaatctcagagacgcttggctatcctggaagcctgtatgattggtttagtctctggattggctgctttctgcttgcgagtaggagcgggatggttagggtcatggcgaatctatggtgcccttaatagtcccctacccgtttgggtgtttttgccgagtgtgggactgattggcggctttctcactggatttttagttgaacgatttgctcccgaaacgactggaagcggagttccccaggtaaaggcggctttaagtggaatgcccatttctctagactttcgagtcgctatctccaaactactcggaacaatgtttacgatgggttcgggtttaaccctcggacgccaagggccaaccgttcaaattggtgccgccctcgctgcttggattgggcgttgggtgccaacttctccaaactacagccgccaaatcatcgcttgtggggcagccgccggattagccgccgggtttaacgctcccattgcaggtgttttatttgtcgtcgaagacttactccacgatatttctggtattaccttggggcctgcaattatcgcctcctttatcggggcggtggtttctcgtctcttagaaggtcaaaaccccgactttgaacccccttcagctgaagttatggaacgttcctatcagcaatggttaattcaaccgggtgaaattcccttttacatcattttgggtattctggcgggtgtactgggaacgctatttagtcgaagcattgtttctgccctccaatttagccgcaaagccttttcattgggactcccggtacgaatggcattagcgggatttttgtgtgggttaattgtttctgtcttacctgtggaatttcgcaacaatgcaggtttgcgggaatttcttctgagtggggaactcaactggacaatcaccgccctagcttttgttgctcactttgtcctgacaacaattgcggcgagttcttcggcacctggcggtttatttgccccctcgctggttttaggagcggcgctcggtaaattgattgggatatgggaatttagcttaattggcttggaacccccaacaaccttcgcctatgcgggaatgggagctttcttttgtgcggtatctcgaacgccaattactgccgttgtgattgtatttgagattacccgagattttaacttagtgttgcaattgatgatttgttcggttgttgcctactttgtcgctgataaaatcgataaacattccctctatgatcgcctactcaaattaaacggtattgagttaaaagaagatcaacttgatcgcgaagcgttgagtaaattactcgccagagatgtcatgcaacgtcaggtggaaaccttatcgagtcagttaccgcttttacaagttagacaggagttttctcgctcccaacatcgagggtttccggttgtagaaaatggcaaactggtggggatagttacccaaagagatttgagtaatgttagtcagcaaaatttgcccgaggatacgcctttacacaagtttatgacttccaaaccgattgcggtgactccggatgaaactcttactcaagttctctatttacttggtaaatataaacctagtcgtttacctgttgttgaaggtcgtcatctggttgggattattacccgcagtgatattattaaagcggagttgggcattcttagcggtgaagatacacaagtcgggttgcatccagaaccttcctatgttgtctatcaaacccgagcgcctcaagttggtcaaggacggatgttggtttcccttcataaccccaaaactgctccctctctgttggaaattgccgcagcgatcgctcgggaacgaaattatgagatagaatgcttaaacgtgattacgatacctcgtcaccgttcgccgagtgaaacgcctgttcgactcactaaaagtcggcgtttgatgcgacaagctgaacaaatggggcgggcttggaaaattcccttacatactcaagttcgggtgacaaatgatgttgctcaagcgattcttgaaacgacaaaagagcgacatattgatctgattttgatgggttggcaaggtaaatcttcgactagcgatcgcgtttttggtaatgtcgtagatatgattattcgagcctgtgagtgtgaaatggttttggtcaaatggccgcaaatggttgatccttttggttcaaaacggaagttgcgcttacattctcttttaggttggcaacggtggttagttccgattcgggatgatgctaaaaagtcggttgcggttcaacttttaccagctttaacacacttgagtcatcaagccgaaattcgtttgttaaaagtgatgaataaagaggtttctgtttcggaaaaacgggcttgggagcatacttcccaggagttaagttctttattgaattctaaagtgagaatcacggcggtgacttctgagtttgttccggatgcggtgattgattttgcttatcaagaacattgtgatgttgtggttttgggggcgagtcgtgaaggaatgctgaaacaagtgattcaaggaaatattcccgaagcgatcgctcgtcattgtgattgtactgtgattttggttcgtcccgcaatcggtcatgcagccgattaa

SEQ ID NO: 100 - protein, 900 aa, Lyngbya sp.
MLRISIPEQLSKRFKIIATQILQPQSQRRLAILEACMIGLVSGLAAFCLRVGAGWLGSWRIYGALNSPLPVWVFLPSVGLIGGFLTGFLVERFAPETTGSGVPQVKAALSGMPISLDFRVAISKLLGTMFTMGSGLTLGRQGPTVQIGAALAAWIGRWVPTSPNYSRQIIACGAAAGLAAGFNAPIAGVLFVVEDLLHDISGITLGPAIIASFIGAVVSRLLEGQNPDFEPPSAEVMERSYQQWLIQPGEIPFYIILGILAGVLGTLFSRSIVSALQFSRKAFSLGLPVRMALAGFLCGLIVSVLPVEFRNNAGLREFLLSGELNWTITALAFVAHFVLTTIAASSSAPGGLFAPSLVLGAALGKLIGIWEFSLIGLEPPTTFAYAGMGAFFCAVSRTPITAVVIVFEITRDFNLVLQLMICSVVAYFVADKIDKHSLYDRLLKLNGIELKEDQLDREALSKLLARDVMQRQVETLSSQLPLLQVRQEFSRSQHRGFPVVENGKLVGIVTQRDLSNVSQQNLPEDTPLHKFMTSKPIAVTPDETLTQVLYLLGKYKPSRLPVVEGRHLVGIITRSDIIKAELGILSGEDTQVGLHPEPSYVVYQTRAPQVGQGRMLVSLHNPKTAPSLLEIAAAIARERNYEIECLNVITIPRHRSPSETPVRLTKSRRLMRQAEQMGRAWKIPLHTQVRVTNDVAQAILETTKERHIDLILMGWQGKSSTSDRVFGNVVDMIIRACECEMVLVKWPQMVDPFGSKRKLRLHSLLGWQRWLVPIRDDAKKSVAVQLLPALTHLSHQAEIRLLKVMNKEVSVSEKRAWEHTSQELSSLLNSKVRITAVTSEFVPDAVIDFAYQEHCDVVVLGASREGMLKQVIQGNIPEAIARHCDCTVILVRPAIGHAAD

SEQ ID NO: 101 - DNA, 2592 bp, Cyanothece sp.
atgggatcacttgcggcactgcggcggttacaacagttgctccgaccgaggcgggtggcggttctggaagcttgcttcattgggctggtatctgcactggcggcggggggaatggcctggggcgtgggctggatgggaacctggcgggtgaatctggcggaacaatggccggactggcttgttcttcccctgtttggggcgatcggggccttgctctccggggcactggtcttacgagaagctccagaagccgctggcagtggtatgtctcaggtcaaagcagtgctggccagagttcccatgcccctcaacctgcggattgccctggttaaactgatcagtgcggtgctggcgcttgggtcgggtctggccctgggcagggaagggccaaccgtgcaggtgggagctgctttagctgcacaattaagccactggttacccacctcgcctgaacaccgccgtcagctcattgccgctggagccggagctggtttagctgcagcctttaatgcgcccatttccggggtgttgtttgtggcagaagaactgatgcaggatgtttccggtggcaccctgggcacagccattctggcctcctttattggcagtagtgtctctcgtttgctgggaggtaacagtctggatgtgaatctggaagccagcaaaatgctcaccagctttacgctgacggaaattcctgcctatctggtactggggggattggctgggctactgggggctatttttgatcacgccgttctgatcagtctcaaattgaatcggcgttatcttcccctgagtttgccttggcgcatggccctggccggactgatcaccgggttgctgattgcccttttgccggagtcgtttcgcaactatgccgaactgaaggaagccctgttgtcaggacaaattacctgggctggggcagcgctcttttttgtgagctactttcccctgatcctgattgcctctggttccggggcccctggtgggctgctcgttcccaccctgttgttgggagcaatgctgggctgctggctggggggaatgcaacacagctttttaggtctgggagtagccgtaagctatgcgcgggtggggatgggtgcatttatggctgctacggcaaaagcacccgtgacggccatcgtcattgtctttgaactaacccatgactttaacctggtcttacccctgatgattgcctccgtgatcgcctacctggtctcggaacgcctcttccccggttccttctacgacagaattctagagctgaatggcatttatctgaatgagctcaccaccgttaataccagcctggcagacatgaccgccgcccaggtgatgcaacggcaggtggaaacccttcgcagtgatatgcccctagaagaagccgttcaagccttttcccgttcccatcaccgtggctttcccgttctggaggaggacaaattggtgggaattgtcacccagactgatctaaacacgatcaagcagcggccgttaccccccaacacccccctgcagcagatcatgaccccctggccaatcaccattcccccccaggaatccttggctaatgtgctctatctgctcaaccgctacaatctcagccgtctccccgtggtggaaggccgtaaactgatcggcattattacccgaagcgatattattcgagcggaagcctctgaactaagtggggaacgacaacaattagccccccgcgtgcaaccctcctacctggtctatcaaacccgctgcactgctagtggacagggacggctgctccttcccctggctaatccggccaccgccgatcgcttacttcagatgggcttagcgatcgcccgtgaacgccagttagagctggagtgcctgcaggtgattgtggtaccccgccacagtgatcccagcactaccccagtccgcactaccctcaatcggcggttattgcaacggatggaacgtctagcccgcccagactccgttccattacatacccagatccgggtcgctcaggatgtggccggggccattctggaaaccattagcgatcgccacattgatgtggtgctgatgggctgggaaggggaaagcctgaccccaggcagcatctttggctctgtcgtggatacgatcgttcaccaggctgagtgtgatgtagttctggtcaaactggcacaggagaacgtgcggttcgatcgctggctcgttccgatcgccggggggccaaatgtccaacgggccatgcaactgttgcccggactcacccgtctcagcccagctccccaggtgaggctctgccaggtgtttgacccggaggcaaccctactggatacccaggcgctggaacagggaatggcattactcaaacctcacctgaatggggccctcagtagtctttccctgcgctctaaatccattgctgaagccattattgagctagcccacgccgaacaggacgatgtcatcctggtgggagccagccgggaaggattactccgtcaggcaattatgggcaatattccctccgcgatcacccgtaatagccattgcagcgtgatcctggtgcggggagcattggagtaa

SEQ ID NO: 102 - protein, 863 aa, Cyanothece sp.
MGSLAALRRLQQLLRPRRVAVLEACFIGLVSALAAGGMAWGVGWMGTWRVNLAEQWPDWLVLPLFGAIGALLSGALVLREAPEAAGSGMSQVKAVLARVPMPLNLRIALVKLISAVLALGSGLALGREGPTVQVGAALAAQLSHWLPTSPEHRRQLIAAGAGAGLAAAFNAPISGVLFVAEELMQDVSGGTLGTAILASFIGSSVSRLLGGNSLDVNLEASKMLTSFTLTEIPAYLVLGGLAGLLGAIFDHAVLISLKLNRRYLPLSLPWRMALAGLITGLLIALLPESFRNYAELKEALLSGQITWAGAALFFVSYFPLILIASGSGAPGGLLVPTLLLGAMLGCWLGGMQHSFLGLGVAVSYARVGMGAFMAATAKAPVTAIVIVFELTHDFNLVLPLMIASVIAYLVSERLFPGSFYDRILELNGIYLNELTTVNTSLADMTAAQVMQRQVETLRSDMPLEEAVQAFSRSHHRGFPVLEEDKLVGIVTQTDLNTIKQRPLPPNTPLQQIMTPWPITIPPQESLANVLYLLNRYNLSRLPVVEGRKLIGIITRSDIIRAEASELSGERQQLAPRVQPSYLVYQTRCTASGQGRLLLPLANPATADRLLQMGLAIARERQLELECLQVIVVPRHSDPSTTPVRTTLNRRLLQRMERLARPDSVPLHTQIRVAQDVAGAILETISDRHIDVVLMGWEGESLTPGSIFGSVVDTIVHQAECDVVLVKLAQENVRFDRWLVPIAGGPNVQRAMQLLPGLTRLSPAPQVRLCQVFDPEATLLDTQALEQGMALLKPHLNGALSSLSLRSKSIAEAIIELAHAEQDDVILVGASREGLLRQAIMGNIPSAITRNSHCSVILVRGALE

SEQ ID NO: 103 - DNA, 2577 bp, Gloeobacter violaceus
atgcaatcctggctgcagaattttcggcaactgctccgtccccagcgcctcgcgacgctggaagcgtgcctgatcggtctggtggcggggctcgcggcggtcatcctcaagcagggcgccgacctcctcagccactggcgcctcgacgctgcgggatcattcggctggtgggtgttgccgctgctcgggcttttggggggagtgacggccggctggttggtggagcgcttcgctccggaagcttccggcagcggcatcccccaggtcaaggcggtgcttgcccgcgtgccgatggcgctcgatctgcgcgtcgccctcgtcaaactggtgggcacgatggtgacgctgggttcagggtttccgctcgggcgcgaaggcccgaccattcagatcggcgcggcgctggccaaccagctcagccgctgggtgcccacttcccccgcttaccgccgccagttggtggccgccggggcgggagcgggattggccgccgccttcgacgccccgatcgccggggtgatctttgttgtcgagcaactgctgcagaacgtttcgggcctcaccctgggggtggccatcctcgcctcgtttatcggcgcggtgctctcgcgggtcctggggggcttcagcttcgacctcaaatcgagcatggccgattttcagaccggttttacggttcaggagatcccgttctatctgttgctcggggtgatggcgggggtgctcggagcgctctacaaccgggggctaatcgcgagccttacctttaaccggcgggtgctgcgtctgaacatgcctttgcgggtgggccttgccggactggttatgggcgggagcctggcgctgctacctgcggtctttcgcgacggcgaagcgttgcgcgggctgattatcggcgcgcaggaaccctggcagttcgccgccctcgccttcgtggcccagtttgtgctgacactcatcgcctatggctccggggcaccgggcggcgtgttcgccccctcgctggtgctgggggctgccctgggttcgctggtgggcacgctctcctacagcaccctggccgtcaacgcgcccatcacctactcgctggtcgggatgggggcatttttctgtgcggtgacccgcgtgccgattacggcggtgatcattattttcgagatcaccaacgacttcaacctggtgctgcccttgatggtcgtctgcgtggtcgcttcgctggtggctgagcgcctcaacgaaggctcgatctacgaccaacttttggcctggaacggcatccgtctgggcgaggaggcggtgagcgacgagaagctgctcgctcaactggcggcgggcgatgtcatgcagacgcgcctggagacgctggagagcacgcttcccctcagcgaagtgtcccaggcgttttcgcgctcgcaccaccggggctttccggtggtcaaggacgagaagctggtggggatcgtcacccagaccgatctgatgaagatcgcggcgcgcaatctgccgcccaccgccccgctcagcgaactgatgacgccgcagccggtcaccgtcactccccgcgacagcctcaaagaggtgctctatttgctcaatcgctacgaattgagccgcctgccggtggtcgaggaggccaagctggtagggatcatcacccgcagcgacatcatccgcgccgaggcggatttgctcagtggcgacacccaggcggtgggtccgcgccccgacccgtcctacgtggtctaccagacccgcgctccggccttgggaggcggtcgcctgctgttgcccctggccaatccggacaccgccccggcgcttttggaatttgccctggccatcgcccgcgcgcgcaacctcgaactggagtgtctgcacgtcatcgccgtaccccgcaccagcgcaccctccagcaccccggtggcagtggccccggcagtcaacctcgtgcgccaggccgtgcgcgccggtcgcgccgtcggggtgccggtacacacccaggtgcgcgtcgcccacgatatcgcccaggcggtgctcgaaacggtcaaagagcggcgcatcggcctggtgctgatgggttggcggggggtgaacacctccccggagcgcatcttcagcaacaccgtggacacgatcatccgccaggcgccatgcgaggtgctcctggtcaagctcaaaggcgacgcgatcccgcgccgctggctggtgcccatcggcggcggccccaacgcccaggaggccattaagattctgcccgccttattgcgccgcggccccggcaagagcgagatcgccgtctgccaggtcttcgcccccgacaatccggcccacgacacaggtctactcgatgcggacgccgagagcctcggccgctcgttgggctaccccgtgcgcgccttgcctttgttctcaaaatccgttgctcaggccatcgttcagtgcacctccgaaggccacttcgacggggtgattattggtgcgagccgcgagagcctgctgcgccaggccatccggggcaacatccccgaaaccgtcgccaagggcagcgactgcacggtggtcgtggtgcgcacttag

SEQ ID NO: 104 - protein, 858 aa, Gloeobacter violaceus
MQSWLQNFRQLLRPQRLATLEACLIGLVAGLAAVILKQGADLLSHWRLDAAGSFGWWVLPLLGLLGGVTAGWLVERFAPEASGSGIPQVKAVLARVPMALDLRVALVKLVGTMVTLGSGFPLGREGPTIQIGAALANQLSRWVPTSPAYRRQLVAAGAGAGLAAAFDAPIAGVIFVVEQLLQNVSGLTLGVAILASFIGAVLSRVLGGFSFDLKSSMADFQTGFTVQEIPFYLLLGVMAGVLGALYNRGLIASLTFNRRVLRLNMPLRVGLAGLVMGGSLALLPAVFRDGEALRGLIIGAQEPWQFAALAFVAQFVLTLIAYGSGAPGGVFAPSLVLGAALGSLVGTLSYSTLAVNAPITYSLVGMGAFFCAVTRVPITAVIIIFEITNDFNLVLPLMVVCVVASLVAERLNEGSIYDQLLAWNGIRLGEEAVSDEKLLAQLAAGDVMQTRLETLESTLPLSEVSQAFSRSHHRGFPVVKDEKLVGIVTQTDLMKIAARNLPPTAPLSELMTPQPVTVTPRDSLKEVLYLLNRYELSRLPVVEEAKLVGIITRSDIIRAEADLLSGDTQAVGPRPDPSYVVYQTRAPALGGGRLLLPLANPDTAPALLEFALAIARARNLELECLHVIAVPRTSAPSSTPVAVAPAVNLVRQAVRAGRAVGVPVHTQVRVAHDIAQAVLETVKERRIGLVLMGWRGVNTSPERIFSNTVDTIIRQAPCEVLLVKLKGDAIPRRWLVPIGGGPNAQEAIKILPALLRRGPGKSEIAVCQVFAPDNPAHDTGLLDADAESLGRSLGYPVRALPLFSKSVAQAIVQCTSEGHFDGVIIGASRESLLRQAIRGNIPETVAKGSDCTVVVVRT

SEQ ID NO: 105 - DNA, 2673 bp, Arthrospira maxima CS-328 ctg36, whole genome shotgun sequence
tcaattcataataggtgggcgtaccaaaatgacagtacaaggacaaccacgggcgatcgcttcggggatattacccttaatcgcctgttgcagcatactttcgccactagcacccaaaacaatcacatcacagtaatcatgattagcaatatccaaaagtacatcaaccacagacctagcacaaacagcagttgccaccacctccccattaatggggcttttcaactcctcaactaggtggtctagctttgccatttccgcctcagacaaagcatttttaaccacagttaacagtcggatatcggggcgcaaactcaacctagccaaaccgggtaaaatgcccattgcggctggtggaggtcccccagttcgcagaggaactaaccaacgtcgccaaaccggaaactggagcgatcgctgatctgaggggtcactaaaaatggggttaacattttttccccacttcaccaaaacaacctcaccgggtacttgtcgaataatggtatcaaccacagtgccaaaaacccgattagtggcggacctttccccttgccacccaatcaaagtcaaatcaatatttcgttcttgcacggtctccaaaatcgccccagacacatcatgactgaccctaatttgagtatgaataggaacccgccagcttttggcaatacgttcagcttggcgaagtagacggcgacatttagtaatggataccggagtttccgccggggacaaattgcgagcaatggtaataatagtcaagcattctagctcataattacgttcagcagcgatcgccgccgcaatatgtagcaaagccggggcggtagtgggattattcaaagccaccaatagtcgcccatgaccgaccatggggccgcgagtttgataaaccacataggagggggtggcatgatgccccacctggtgactaccgctaatatatccaagttcaccgcgaataatatcgctgcgggtaataattcccaccaaatgccgcccctcgacgacgggaaggcgactgagtttttgccgtcccaacagatacagaacctcactgaggggagcatcagggtaaatagtaacaggttggggagtcatcagcttatgtaggggggtttgttctgatatgtcttgttggttaatctttgccatatcagtttggctgataataccgaccaatttaccctggttgactacgggaaagccgcgatgatgggattgagaaaaagcggacctaacctgttctagggataactgatcttcgagagtttctacctgtcgctgcataacatccctagcgtgcaacatatttaaggctacccggtcagcattttggtcaggttccaattcaatgccactcaaagccaataggcgatcgtatagggaatctttttctatcttttcggctaccaaataggagaccacagaacagatcatcagtggcagaaccaagttaaaattggtggtgatttcaaagacaatcaccacggcggtgaccggagtccgagacacggcacagaaaaaggctcccattccggcaaaagcaaaagtggtgtgaggttgtaaggcgatcgttgcctcttcccataagccaatagtattccccaaagccgcgcctaaaattagggatggtgcaaataatccacccggcgcaccggaacccgccgccatggtagttagggaaaactgcactacaaaagctagggctgtggttgtccagaggatattacctttgaggatatattctcgcaaaccggcattatctcgaaaagtctctggtagcacagcaataaccatcccacaaattagacccgccacagccatactcaggggtagtcctaatttgagggtatggcggttaaatttctgaaaggtaataattccccgactgaataacaccccaaatactcccgagagaacacccaccaggatataaaaggggatttctaggggttcaattaaccattgttgatatagggcttctgggggtatgtctatggtgggaggtagtcccatggctttgtttcctaatagccgggatactaccgccccagtaaatgaggcgataatggcgggtccgagggttaatcctgagatgtcgtgtaggaggtcttccactacgaataaaaccccggctatgggagcgttaaacccggcggctagtccggcggcggctccacaggcgattagttgtttgcgatagttgggagaagtgggaacccaacgacttacccaggcggcgagggcggctccgatttgtactgttggcccctgtcgtcctagggtgaatccagaagccatggtgatcatggtgctgatcagtttgactactgctacccgtagatctagggaggttttgattccccctagggctgctttaacttgggggataccgcttccggctgcttctggggctatgcgttcgactaggaaaccagacaacagccccccgactacgcctaatatgggtaaaaatagccaagctgaaaagtgggcggaaccttggactcgccaagaccctaaccacccggctcctgttctcagaaaaaaggcggctattcctgaaattaatccgattaagccggcttctaaaatggccagcctttgggaaccgccaattatggatttggcgaggctctggaattgattggttaaggatggccagtacac

SEQ ID NO: 106 - protein, 890 aa, Arthrospira maxima CS-328 ctg36, whole genome shotgun sequence
MYWPSLTNQFQSLAKSIIGGSQRLAILEAGLIGLISGIAAFFLRTGAGWLGSWRVQGSAHFSAWLFLPILGVVGGLLSGFLVERIAPEAAGSGIPQVKAALGGIKTSLDLRVAVVKLISTMITMASGFTLGRQGPTVQIGAALAAWVSRWVPTSPNYRKQLIACGAAAGLAAGFNAPIAGVLFVVEDLLHDISGLTLGPAIIASFTGAVVSRLLGNKAMGLPPTIDIPPEALYQQWLIEPLEIPFYILVGVLSGVFGVLFSRGIITFQKFNRHTLKLGLPLSMAVAGLICGMVIAVLPETFRDNAGLREYILKGNILWTTTALAFVVQFSLTTMAAGSGAPGGLFAPSLILGAALGNTIGLWEEATIALQPHTTFAFAGMGAFFCAVSRTPVTAVVIVFEITTNFNLVLPLMICSVVSYLVAEKIEKDSLYDRLLALSGIELEPDQNADRVALNMLHARDVMQRQVETLEDQLSLEQVRSAFSQSHHRGFPVVNQGKLVGIISQTDMAKINQQDISEQTPLHKLMTPQPVTIYPDAPLSEVLYLLGRQKLSRLPVVEGRHLVGIITRSDIIRGELGYISGSHQVGHHATPSYVVYQTRGPMVGHGRLLVALNNPTTAPALLHIAAAIAAERNYELECLTIITIARNLSPAETPVSITKCRRLLRQAERIAKSWRVPIHTQIRVSHDVSGAILETVQERNIDLTLIGWQGERSATNRVFGTVVDTIIRQVPGEVVLVKWGKNVNPIFSDPSDQRSLQFPVWRRWLVPLRTGGPPPAAMGILPGLARLSLRPDIRLLTVVKNALSEAEMAKLDHLVEELKSPINGEVVATAVCARSVVDVLLDIANHDYCDVIVLGASGESMLQQAIKGNIPEAIARGCPCTVILVRPPIMN

SEQ ID NO: 107 - DNA, 2616 bp, Acaryochloris marina
atgaagctaatctcggcctttcaacccctgcgccacctcactcagtccagtcgctttgccattattgaagcctgtctgattggtcttatttctggtttagcagccgtcgccttgcaggatgggattgggtggttaggggggctacggatatctttggccaaccaatttcattctcctctgatactgccgttaataggggttatcggcggtttaattgcagggttgctgatagaaaccatcgctccggatgcgaaggggagcggcatccctcaagtgaaggctgcactggcacagtttccgattgcgctgaattggcaagtcgcgctggtcaaattgttcagcggcatcactgccctgggaactggattacctctagggcggcaagggcctacggtacaactaggcgctgccctggccgctcagctaagctactggttccctacagctcccaaccaccgacaacaaatgattgcggcaggggcaggagctggactcgcagcagggtttgcggctcccattgctggagtgctttttattgtcgaggagctgctgcatgacttatctggattaaccctggggaccgccattctgtcctcctttatcggtgcagttgttgcccatgttttaggggggcaaaacttatctatcagctttgagcaggtcaccaccgccaccagcttctccgttccggaaattcccttctttattttgctggggattttggctggaggatttggcgctatattcaatcgaggtctgctcctcagcgttgatctaaaccgccgactcaagttccttggattaccctggcgcatcagcttagcaggcggtatttgtggcagcattattggccaactgcccagcattttccaggacaatacggggctcagaggactattgggtttaggagatctgggttggcagttggccctaacagccttcgttgtccagtttggactaaccctgattgcctatggttcaggggctccaggcggattatttgcccccagcctagtcatgggggccgccttagggaatttagtagggctaggtcaggctcaactactcggtgctggtttacccacgacttatgcgtttgtgggcatgggggcgttttttggggccgttagtcgtgtccctgtaactgggatcgtgattatctttgaaatcacccaggatttcaatctcgttctccctctgatgatcagctctgtagtcgcctatctaaccgctgagcaaatcaatcaaagttctatctatgatttgttgctacagcaacaaggcattcaactccaaaatgcatccccctctgcgcaacggatgttagatgccctaacggcagaagacattatgcagcggcaagtggaaacgttacctagcgatctgtctttagatgcagcccgaaagattttttcccgttcccaccatcggggttttccagtgctcgaagaccgacgattagtggggatcttgagtcgtacagatcttaatcgagttacgcaacaacagaaacccggcgataccttaatccgggatatcatgacgccccagcctttaaccgttggtccctcggcatctttgtctgatgtcctgtatattctcaatcgctcccatatcagtcgtctacccgtattagatggacgtaaactcatcggtatcattacccgtgccgatattattcatgctgaatttgatcacatttccggccagaagcaacaggataatcaggcttttgcgccatcctacggcgtctacctaacccgagggcctgccactggcgaagggcgaatcctcttacccctcgcgaatcctgacacagctgaacccctcctaaaggttgctgtagccatggctcaagccctgaactatgagctagagtgcctgcacattatccgtctaccgcgtaatcgtttaccagctgagacccccgtccaaaccgtcaaaggtcggcgacttctgcaaaaagcaattcggtatggccaacgccaccaagtgtctgttcatacccaaatcattgcggctcaggatgtggcccaagccattttggaagtcgaacagacggagcatatcaacctcctgcttatggggtggcaaggacaatttttctccggtggacagattggtaatcccacggttcgaaccatcctccagcaggccaaaagccaagttttagtcattagacctgccacccacttcaatactggtaaaaaccaacgttggcttatcccagtgtctggagggccaaacgtgcaacaagcgattcaacttttgccagccctcgttcccatcagtaagtcacccaagctgaaattgtttcaagtttatccccccagtagtgatctgcccgaccagagtattctcgaacactactcccagttcctcaaacaggcctgcccggatagtgcagtcaaacggacacaaatttgtgctcaaaatgtggcagacgctattgtggaactggcaaggctccaaaagacagacatcatcgttattggagccagcccaactgggttagtccaccaagcactcaaaggaaacatccccctagccattgctcaaggaacagaggcgaccatcattttagtgagaggctctggaaccaacgttgtggtttag

SEQ ID NO: 108 - protein, 871 aa, Acaryochloris marina
MKLISAFQPLRHLTQSSRFAIIEACLIGLISGLAAVALQDGIGWLGGLRISLANQFHSPLILPLIGVIGGLIAGLLIETIAPDAKGSGIPQVKAALAQFPIALNWQVALVKLFSGITALGTGLPLGRQGPTVQLGAALAAQLSYWFPTAPNHRQQMIAAGAGAGLAAGFAAPIAGVLFIVEELLHDLSGLTLGTAILSSFIGAVVAHVLGGQNLSISFEQVTTATSFSVPEIPFFILLGILAGGFGAIFNRGLLLSVDLNRRLKFLGLPWRISLAGGICGSIIGQLPSIFQDNTGLRGLLGLGDLGWQLALTAFVVQFGLTLIAYGSGAPGGLFAPSLVMGAALGNLVGLGQAQLLGAGLPTTYAFVGMGAFFGAVSRVPVTGIVIIFEITQDFNLVLPLMISSVVAYLTAEQINQSSIYDLLLQQQGIQLQNASPSAQRMLDALTAEDIMQRQVETLPSDLSLDAARKIFSRSHHRGFPVLEDRRLVGILSRTDLNRVTQQQKPGDTLIRDIMTPQPLTVGPSASLSDVLYILNRSHISRLPVLDGRKLIGIITRADIIHAEFDHISGQKQQDNQAFAPSYGVYLTRGPATGEGRILLPLANPDTAEPLLKVAVAMAQALNYELECLHIIRLPRNRLPAETPVQTVKGRRLLQKAIRYGQRHQVSVHTQIIAAQDVAQAILEVEQTEHINLLLMGWQGQFFSGGQIGNPTVRTILQQAKSQVLVIRPATHFNTGKNQRWLIPVSGGPNVQQAIQLLPALVPISKSPKLKLFQVYPPSSDLPDQSILEHYSQFLKQACPDSAVKRTQICAQNVADAIVELARLQKTDIIVIGASPTGLVHQALKGNIPLAIAQGTEATIILVRGSGTNVVV

SEQ ID NO: 109 - DNA, 2694 bp, Cyanothece sp.
ctattcagcgctgagggctttgcggaccaggataaccgtgcagtcagagtggcgggcaatttgttcaggaatattcccctgaatcacctgctgcagtaacccttcccggctggcccccagtacaatcacatcacactggtctttttcgactaaatcgacaatggcatcggcaacggagtcagcacaaagggtgagggtgatcacgggagcttgaagttgctggttcagaaaatcggcatcctgctccagtaaggtggtgtcgtggtaaggttctgagggggaaaatacttgacacagccgaatttgggggtgctggctgagggcaaccagggctggtagcaaggtgagagcatactgggcattgggtcctccggcaacgggaaccagccagcgattgagtgtgaacagccgcatgagcagtgtgagggccgattgaccagacaggtctgctgccttggccaggggaagaatcagctgcttgccgggccgaaccagcacaacattacaactggcttcgcggacgatcgtgtctaccaccgtgccaaaaatgcgtcctggggttaacgttaccccctcccaacccatgaggaccagatcgatgtgccgatctcgaatggtttccagaatggccatagcaatatcctgggcaacgcgaatttgggtatggacgggcacctgccaggtttgtcccccagcaaccgcatgttccatcatttggcggctggccgtaatatcgacactggtttcggagggccgactgtggcggggaatcggaataatatgtaaacattccagatcatagtgatgctgttgggcgatcgcggcggccaggcgcaacagggcatcagtggtttggggattactcagcggtaccagtagccgtccctgagctgttgtggaggactgggtttggtacaccgggtaggaaggggcaggtttgactttgaggggactggcttcaccactgagacgatcgcattcagcccggataatatcagcacgggtgataattccgaccagcttgcgtccctccgtcacaggtagacggctgatctgataatggttgagcagatacaggacatgggccaatcgatcgccaggaccaacactgatcaatcgttgggtcataatctgactgaggggtaagtccgggctcagccccctgacgctcactctggccagatccgactgagtgaccatccccactaatctgccatccgccactacgggaaacccgcggtgatgggattgctcaaaaaactgaatcgctgcagcgatcgtcatgtccgccggtaaggtttcgacccgtcgttgcatgatgtcggctgccagtaagccctgcaactgctgatccccggcgaacttttgatccagctgaatcccccgtaactctaacagatgggtataaatggagcctttggataccttttcggccaccaggtaggccaccactgagccgatcatcaaaggcagtacaacatcaaagtccatcgtcagctcaaagacaatcacgatcgctgtgatcggcccgcgggttacagcactaaagaatgcccccatgcctgtgagggtataaatgaccggcgcttgggagaggacggttccattcagctccagttggactccttgagccatctggccaatcaatccgcctagggccgaacccagaattagggagggtgcaaataacccaccgggaacccctgaaccgtaagccagcagcaccagcagaaatttgccgacaaaggcgatcgcggtgatctgccagccaatctcccccagaaccagcaaatcctgagtgccactactagaccgcagaatcgggggtaaaaacgccaggatcatcccactgattgcacctgccagccccatttgccaggatggccgccagcccggtaggtattgccggtaaaagcgcaaactggtcaaaatcccacgattaaagctggcccccagcaccccagcgatcgctcccagcagcatcaacaccggaatatccatgagcgtaaagctcagatcgatcccactcagatcgggaattaagcctcttccccccagtaaacgggaaacaacccccccgacaaaggccgccagaatagccgtgcccagtgttagttccgataaatcctgaagtaactcttcaatcacgaatagcaccccagcgatcggcgcattaaatccagccgctaaacccgctgctgcccctgcggctattagttggcgttgataagccggtgaagtagctaaccagcggctgaactgtccggccagtgccgctccaatctgtacagtgggtccctgtcgccccagggccaggccagcccccagcgccagagttgtactgaccagtttgactacagccacccgcagatcgagggcgatcgaggcatagcccagggccgctttcacctggggaattccactgcccgtagcctccggggcggcccactcaatcaaccagccactcagtagcccccccaacagtccgatcaccggcaaaatcagcaggggaggcagatctgcaccgatcgctgccgtccagctttccattgcggcgatcgcctgcttcaacaaaacggcagccagcgccgagaccaacccaatcaaacaagcttctaagatggcaacagatttggggcggagtaagcgttgcagggattgggtcagccagatggttcctttcataagggccat

SEQ ID NO: 110 - protein, 897 aa, Cyanothece sp.
MALMKGTIWLTQSLQRLLRPKSVAILEACLIGLVSALAAVLLKQAIAAMESWTAAIGADLPPLLILPVIGLLGGLLSGWLIEWAAPEATGSGIPQVKAALGYASIALDLRVAVVKLVSTTLALGAGLALGRQGPTVQIGAALAGQFSRWLATSPAYQRQLIAAGAAAGLAAGFNAPIAGVLFVIEELLQDLSELTLGTAILAAFVGGVVSRLLGGRGLIPDLSGIDLSFTLMDIPVLMLLGAIAGVLGASFNRGILTSLRFYRQYLPGWRPSWQMGLAGAISGMILAFLPPILRSSSGTQDLLVLGEIGWQITAIAFVGKFLLVLLAYGSGVPGGLFAPSLILGSALGGLIGQMAQGVQLELNGTVLSQAPVIYTLTGMGAFFSAVTRGPITAIVIVFELTMDFDVVLPLMIGSVVAYLVAEKVSKGSIYTHLLELRGIQLDQKFAGDQQLQGLLAADIMQRRVETLPADMTIAAAIQFFEQSHHRGFPVVADGRLVGMVTQSDLARVSVRGLSPDLPLSQIMTQRLISVGPGDRLAHVLYLLNHYQISRLPVTEGRKLVGIITRADIIRAECDRLSGEASPLKVKPAPSYPVYQTQSSTTAQGRLLVPLSNPQTTDALLRLAAAIAQQHHYDLECLHIIPIPRHSRPSETSVDITASRQMMEHAVAGGQTWQVPVHTQIRVAQDIAMAILETIRDRHIDLVLMGWEGVTLTPGRIFGTVVDTIVREASCNVVLVRPGKQLILPLAKAADLSGQSALTLLMRLFTLNRWLVPVAGGPNAQYALTLLPALVALSQHPQIRLCQVFSPSEPYHDTTLLEQDADFLNQQLQAPVITLTLCADSVADAIVDLVEKDQCDVIVLGASREGLLQQVIQGNIPEQIARHSDCTVILVRKALSAE

SEQ ID NO: 111 - DNA, 2580 bp, Synechococcus elongatus
ttaacgtctctgaatgattacggtttgcggtgcctgtgctaacagatctttccagagggttgtggtgggcagctgttccaaggtcatcgatagcatcaccgcttcgatccctcgactttgcatcacatccaatagcactgctgtcaccgatcgcgcacagatcaagtctgcttggatgggttgccgcaggcggttctccagtcgtcgctgcagctgctggagacggttggctgaaacggtttgtcgagggaggtcgatctgacagagggagatatctggatcggtaatcaactgcaggatttgttccaagggctcggccaaacctgtctggggcacctgggcgctgaggggaatcagccaatggcgtagcggcagagtcgggcgatcgccctgcaggagtggcgccttggccaggaatgcagccccgggtttgaccaacagcacccggcagggagcctgctgcaaaatctgatcaatcccttcgcggaacagccgttgggctaaggaagccccgccaccccagcccatcacgagatcgttgatgtggcgatcgctaatcgtttctagaatcgcagcagaaagatcgtgacaaacccggacttgcgtatgaaccggaatctgccagcgtcggcccaaccgctcggcctgccgcaacattcgccgtgctccaagagttgaaactgctgtttgagagggatcggcttcgcgagagacaggaatcaggtgcagacattccagctcgtagttccgcaaactggcgagccctgccgccaactgcaacagagattgagctgtgcgcggattggccagtagcactagcagacgtccttggccggtagcgggcgatcgcgtttcgtaggcgacgtaggagggggcgatcggcgtcgcagcaatatcttgaccgcttaggagttccgattcggcccgaatgatgtcggctcgtgtgatgattccgaccagcttgcggccatcgaccacgggcaaccggctgatttggaagcggttcagcacgtaaagaacgtgggccagagtgtcttggggggcaactgtcagcgggtgaggcgtcatgatttcgctgagccgcacggactcgcctttgcctttgagggtttgttcatccagatcggagctggtaacaatgccgactagagcacctttttgagtaacaggaaaacctcggtggtgagtgcggttgaattgctggattacttcagtcaggggtaggctggcttccagagtttccacaggactagccatcacctgggcagcagtcagacccaagctgctgttgagagttggcaaggcgtcaaccactgcggctgctttgctgggcgatcgcgccaagctggcaattccataggcggtaatcgaggccaccatcagcggtaacactgcgttgaaatcgcgggtcatctcgaacacaatcacgatcgccgtgatcggcccttgggtgacggcgctaaacatcgcgcccatacccgccaaggcataggttgccggagcatcgatccgcagcggaatcccaacctgcaaaaagatcgcctgaatggaaagcaccacgcccagacccaaactggaaccgagcaccagcgctggcgcaaaaatcccgccagaagcccctgatccagcagccaccagcgtcagaccaaagttgatcgccaacatcagcaacgcgatcgagccactgtccgggatggtcaccctaaaggggttactcaggccttgccgcagcgcagcagggagcaacagcagtagtaaggccgagatcccactggcgatcgcaacccgccaaggcagccccttgagcggtaagcgttcataacagcgttgactgaacgccaagccgcgattgaacaaaatgcctaggccccctgcaaacagtcctaaaagtaggacaacgggcagctcaggcacggtcagggcggctggagcagcaacaatttcagagctgaaactcaggctttgactgccgagaattcccgaaacaactgccccaataaaggctgcgaggactgctgtcccaagggtgaagctagagacatcatggagcagttgctccagcactagcatcacaccggctagcggtgcattaaagccagccgcgaggccagcggcagccccggaagcaatcaactgtcgtcggtagtctggcgaggtggggaaccactggctcatctgacccgcgagggaagcgcccacttgcacggttgggccttgccgccctaggggcagccctgaaccaaccaccagcatcgtgctggcaattttgacgatcgcaacccgtaggttcaaggcgatgcggctgcctgacagtgcggcttgcacttggctgatgccgctgccctcggcttcgggggcaaaccgttgcaccagccaaccggcgatcgcgcccagaatcggtggcaaaaggagctgcaggccaagtggcagtcccgggcgatcgcgcagatcttgaacacccgttgcacccagtttgagcaggaaggcactcgcccctgaaaccagcccgattgcgcaagcttccagcacagcccactgctgcgctttagcaaaccgtggcggaaaacgcagacgaaacac

SEQ ID NO: 112 - protein, 859 aa, Synechococcus elongatus
MFRLRFPPRFAKAQQWAVLEACAIGLVSGASAFLLKLGATGVQDLRDRPGLPLGLQLLLPPILGAIAGWLVQRFAPEAEGSGISQVQAALSGSRIALNLRVAIVKIASTMLVVGSGLPLGRQGPTVQVGASLAGQMSQWFPTSPDYRRQLIASGAAAGLAAGFNAPLAGVMLVLEQLLHDVSSFTLGTAVLAAFIGAVVSGILGSQSLSFSSEIVAAPAALTVPELPVVLLLGLFAGGLGILFNRGLAFSQRCYERLPLKGLPWRVAIASGISALLLLLLPAALRQGLSNPFRVTIPDSGSIALLMLAINFGLTLVAAGSGASGGIFAPALVLGSSLGLGVVLSIQAIFLQVGIPLRIDAPATYALAGMGAMFSAVTQGPITAIVIVFEMTRDFNAVLPLMVASITAYGIASLARSPSKAAAVVDALPTLNSSLGLTAAQVMASPVETLEASLPLTEVIQQFNRTHHRGFPVTQKGALVGIVTSSDLDEQTLKGKGESVRLSEIMTPHPLTVAPQDTLAHVLYVLNRFQISRLPVVDGRKLVGIITRADIIRAESELLSGQDIAATPIAPSYVAYETRSPATGQGRLLVLLANPRTAQSLLQLAAGLASLRNYELECLHLIPVSREADPSQTAVSTLGARRMLRQAERLGRRWQIPVHTQVRVCHDLSAAILETISDRHINDLVMGWGGGASLAQRLFREGIDQILQQAPCRVLLVKPGAAFLAKAPLLQGDRPTLPLRHWLIPLSAQVPQTGLAEPLEQILQLITDPDISLCQIDLPRQTVSANRLQQLQRRLENRLRQPIQADLICARSVTAVLLDVMQSRGIEAVMLSMTLEQLPTTTLWKDLLAQAPQTVIIQRR

SEQ ID NO: 113 - protein, 10 aa, Artificial sequence
  motif 9
  VARIANT (2)..(2): / replace = "Ser"
  VARIANT (3)..(3): / replace = "Ile"
  VARIANT (4)..(4): / replace = "Gln"
  VARIANT (5)..(5): / replace = "Val"
  VARIANT (8)..(8): / replace = "Ser" / replace = "Gly"
PTVHIGAALA

SEQ ID NO: 114 - protein, 16 aa, Artificial sequence
  motif 10
  VARIANT (1)..(1): / replace = "Ser"
  VARIANT (4)..(4): / replace = "Leu" / replace = "Val"
  VARIANT (5)..(5): / replace = "Leu"
  UNSURE (6)..(6): Unknown amino acid
  VARIANT (8)..(8): / replace = "Ser" / replace = "Thr"
  UNSURE (10)..(10): Unknown amino acid
  VARIANT (11)..(11): / replace = "Met"
  VARIANT (13)..(13): / replace = "Ala" / replace = "Thr"
  UNSURE (14)..(14): Unknown amino acid
PGGIFXPALXLGSXLG

SEQ ID NO: 115 - DNA, 1264 bp, Oryza sativa; identical to SEQ ID NO: 50

SEQ ID NO: 116 - DNA, 54 bp, Artificial sequence
  primer 1
ggggacaagtttgtacaaaaaagcaggcttaaacaatggcttggtttccctttt

SEQ ID NO: 117 - DNA, 52 bp, Artificial sequence
  primer 2
ggggaccactttgtacaagaaagctgggtttactcgtctagaccgaaatctg

SEQ ID NO: 118 - DNA, 2940 bp, Synechocystis sp.
ttaattgggaaatttaatgtaacggttccgcttcataaatgcggcgactttgagccaattttttgcttccttttcccaattcttctggctagtagtctgccaaagttgaattaaaaaacaagctaaacgagacctcaaagtcgattgttgatccttgtcgagggcatcacgccgctctaccaaaacatttacccagggcataattgcttcccgcaccggaatgggatgctgttctaaaaccgtagcggcggtttcgtaggtggaagcatcaatggtttcaatatctagtaaatccttccatgtcttaaatacttcaaatttgctggtggcggtcaaaacattaccgttgccgtaaataacccgtacttgtactgcatccttggattttttatcttctccttctccatactcatgttctttggcttcctcttccgcttcccaaagatgctccaaggcgatcgccagggggacagagtggtgggcaatggtaatgccaaagctaatggtggccccatcccccatggtaaacaagggccgttggggcaagtttttgtgggcagtttttgagtgccaataatgccccgtgctgtcaaattccctgtgttcatcgcgatcgccacgaaaggcttggcgaatgtcccacaaccattgatcccattcccacaggttggtgtaggccagtacatcgtctccgccgctataaattaatctgcctgcatatctttgttcggtgaggtagggcaccaattggttggagaaatccagcagggctcgactcagggcgttatgggtagcagggcccatccgtttaggctgttcgctaaagggttgaaaagttggctgtaggtcttccggcacagttaaaacctggggaaaataatcgccgtaggttctcattttggtgcccttgagccattcgctcatgccatccccatccccagcagctaaaacgtaccaactagtgggattattctggggataaaatttttcgatttctgtttgcaatgcttggcgataactaggcaactctgtttggtcgagatcttccaattcttccaccaaccaacccgaatttagtagccggggatgatattttttctccatgttttcttcgacccagggaattccccaatcttgggtgacagaatcggccactttatggcgatcgccaaggattttttgggagatggcggagcaggcctgctcaaaaatcggtagaccatccggttgggtttttaaatatcccgctatgcccaccgtaagatctgggtaataggtttttaattccttggccccccgtcccagtaatgcaggcaatactttttccaaaccccgcttcactgtttccgtggcatttaactgttcactgccatcaaataaccctgcctgtcgttgccaatatttttgtgtatctccctctgtgacccaatcccgttggtgactaggggcttggggatggaccactggcccaaggccggaaatggtggaccgggggccaaaggcggtgggaattttccagttgcgagcatttttaaccgcactaagggtaaatctggtttggccaaagatatctgcccaccaggaacccacattcaagctaccggcatagttgcggttccgttgctggataaacaaatccgtggatttttcgataaagtccaattcttcctgggcaaataaactagcggaaaatgcttcattttgttccctaacccattggtctcgttgggctttactttccggtgtttgggtgggaatgcccacactttttagggtttttccctccgccccgatcgccatggcgctccaataggtctgccactgggcatccagccaatgtttccaggtgggatcagttgggtttaactgtttttgccaatgtcgttgttgcaattctgcaaagactaaatgggcaatatttcgccaagcgtttagtagatgatttttggccgattgcatggcggcgctaactttttctttgggcagtaccaacataattacgttgggaaatcccgctgttaacagttggcgatcgcctggctggggtacccactgactaaagccttgctcaccatatttttctagtagccaatggtcgatcaagggttgaccgtacaggctggggtacaggaaacaatcggggccatactgctgggccaattcccaacaaactttggcggacaggtagtgcaatatccaagacccagcccaaaagtctttgattttacggctggctttaattagttcttgaatggggctaaaggtgaatacggccagataagcttgggatttgggtgtatttcttgctcctttggcaatatcttcaatgttggtgtcatagcccgccaatgctccggctaaggcggctgtcatactgccatggctccaaatggaagcatcgggcaaacgggtttccgctggcattaacaagctctctgggccaaattgttcggccactgcttcgggcaaacatcgccataaccaccaaaagcattcctgggctttgtctgtaccatggagaaattccgctggcatttgctggatcagttctaattctttttgctctaaataagtacggcgattaccttggccaataatttcgctatgatttgctagttttaatggcaacttagccccggataggagatgggaaagttcgagccctttgccgtcatagtctatgggcgtaccaatatagtgaatggctccccgatcgctggcggaagcgattagatcggataaaccaatatggtcaagccaactattgctcagttcaccgtcttttttttctgtgctggatttgggtgacacccagttttgcatacagcccaaggactgccaagctccctctcctcctctgccagagttgttatgtaaagctttgagggcggggtcgtggagtagcccccaaatttttgcttgccagtaaacttcagacac

SEQ ID NO: 119 - protein, 979 aa, Synechocystis sp.
MSEVYWQAKIWGLLHDPALKALHNNSGRGGEGAWQSLGCMQNWVSPKSSTEKKDGELSNSWLDHIGLSDLIASASDRGAIHYIGTPIDYDGKGLELSHLLSGAKLPLKLANHSEIIGQGNRRTYLEQKELELIQQMPAEFLHGTDKAQECFWWLWRCLPEAVAEQFGPESLLMPAETRLPDASIWSHGSMTAALAGALAGYDTNIEDIAKGARNTPKSQAYLAVFTFSPIQELIKASRKIKDFWAGSWILHYLSAKVCWELAQQYGPDCFLYPSLYGQPLIDHWLLEKYGEQGFSQWVPQPGDRQLLTAGFPNVIMLVLPKEKVSAAMQSAKNHLLNAWRNIAHLVFAELQQRHWQKQLNPTDPTWKHWLDAQWQTYWSAMAIGAEGKTLKSVGIPTQTPESKAQRDQWVREQNEAFSASLFAQEELDFIEKSTDLFIQQRNRNYAGSLNVGSWWADIFGQTRFTLSAVKNARNWKIPTAFGPRSTISGLGPVVHPQAPSHQRDWVTEGDTQKYWQRQAGLFDGSEQLNATETVKRGLEKVLPALLGRGAKELKTYYPDLTVGIAGYLKTQPDGLPIFEQACSAISQKILGDRHKVADSVTQDWGIPWVEENMEKKYHPRLLNSGWLVEELEDLDQTELPSYRQALQTEIEKFYPQNNPTSWYVLAAGDGDGMSEWLKGTKMRTYGDYFPQVLTVPEDLQPTFQPFSEQPKRMGPATHNALSRALLDFSNQLVPYLTEQRYAGRLIYSGGDDVLAYTNLWEWDQWLWDIRQAFRGDRDEHREFDSTGHYWHSKTAHKNLPQRPLFTMGDGATISFGITIAHHSVPLAIALEHLWEAEEEAKEHEYGEGEDKKSKDAVQVRVIYGNGNVLTATSKFEVFKTWKDLLDIETIDASTYETAATVLEQHPIPVREAIMPWVNVLVERRDALDKDQQSTLRSRLACFLIQLWQTTSQKNWEKEAKNWLKVAAFMKRNRYIKFPN

SEQ ID NO: 120 - DNA, 2952 bp, Synechococcus sp.
ttaaactttgcgagtacgaagattaaaggctgcggctttgagccagtttttggattctttatcccagtcatctgcgttggtcgtattccacagttcttgcaaaaagtgagctaaatatttttgcaagccgattttttgttcttcgttaaggttgctacgccgctccacaaaagcactgacccatggggcgatcgccactgaagtcggaataggatgctgttctaaaagggttgccgccgtttcaaaggttgaagcttccagacctgtgatttctaagagttgttgccacgctcggaaagtatcgaatttacaggttgctttgaggatattgccattgccatagatcacccgcaactgcaccgcatctttctttttctttctctccttaccttctagggcgaaatcttcatattcatgatctttagctccttcttctgcttcccagagattttcgagggcgatcgccaagggaacagaatgatgggcaatgactaaaccaaaactaatagttgcattcttgcccatggtaaaaagagggcgatcaaaccgatcggcttgccagtaatgaccttgattattaaattcaccacaatcgtctttatctcctcgaaaagcttggcggatatcccaaagccactgatcccattcccatagatttgtataagccaggacatcatcaccgccgctgtaaatcaagcgtccggcatagcgttcttcagtgaggtagggggcaagtttattagaaaagtcgaggagggcacggcttagggcattgtgggtggcggggcccatccgttttgcttcgtcgctaaatttgtcaaagcttttttttaaatcattaggaacattgagagctttggggaaatattctttgtaggcttccatctttgttcccttcaaccaatcgctcatcccatcgccatctccagcggcgatcgcataccaactggcgggattattttggggatagaatttctgaatttcgttctgtagatcctgacgataaactttttgagcttccttatcgaggttttctaactcctccacaagccagcctgcatttaatagtcttggatggggcaaattctcaaataacggatcatgagtctcatcaatccatggaatgccccactcttgccggacaaaattcgcgatttcatggtggtctgccgtaatttttgtcctaatcgcacgacaagcatcttgatattgatttaaagcttctccatttttctcactttgggttttgaggtaacccgcaacgccgacggttaaatcaggataataagcctttaattcggtcggatctcgatccaatagtttgggtaaaactttttctaaaccgcgcttaacagtttcagtggcgttgagttgctcgatcccatcaaacaagcctgcatcccgttgccaataatgttgcgcctctccctcagtgagccaatcacgatgttggccattgccttggggatggacgacaggccctaaaccagagatcgtagagcgggtgccaaaagcggtcggcagtttccagttacgggcatttttaacggtattgagggcgagacgagtctgcccacaaatatctgcccaccatgagcctgcgtttaagctgcctgcataattacggttgcgttgttcggtaaattttgctgtcgctttctcaaaaaagtcccgttcagtatctgtgaaaagcttgccattaaaggctttattttgttgttcgatccatttttcgagatcagcctttttgtctgaagtctgggtaggaatcccaacactcttaaagctgctatttttatcaccgatcgccaccgcactccaataggtttgccattgggcatcgagccagcctttccaactgggatctgtatcgctcaggtttgtttgccaatggcgatcgccttgtaattctgcgaggacttccttcgcaatttcgcgccatgcatcaagtaagaaattctttgctgattgcattgctgcagctacttgggcttccggtaacaccaacatgatgacgttgggaaatccggcagtgagcagttgacggtcatctggtggctggatccagtcctcaaattctgaatgtttttgcaatagccaatgatcaattagcggttgtccataaagactgggatagagaaaacaatctgcgccgtatttgtgggccaatcgccagcagactttcgcagaaagataatgcaaaatccatgaccccgcccaaaagtccttcattttacgactggctttaatgagttcctggacgggactaaaggtaaacaccgccagataagggtgagatttcggggtattttgaccaccttttgggatatcgtctaactcggtatcgtatcccgctaaggctccggctaaggcagcagtcatactggcatgactccagatcgaaccgtcaggtaagcgagtttcggcgggcattagaaaacttgctgcgccaaattcatcagcgacagcttggggtaaacagcgccatagccaccagaaacaagcctgggcagcttcaggatcgtcacgaatttcggcgggcatttgatcaatgagatcggcttcagtctgttctaggtaagtttttctgctgctctgcccaaggatttcagcgtggttttggagtcggaggggcaatttctccccagataggaggtgcgataactctagaccttctgcaccgtagtctacggctgtgccgatgtagtggataatgccgcgatcgctggctgaagaaatgagatcacataagccgacatgatctaaccatgtgccactaagctcagatgcttgtttttcctcgctcgatttcggagaagcccagccttccatacaagcaagctttttccataacccttcttcgccacgccccggattcccatagagtgctttgagggcgggatcatggagtagaccccaaatttttgcttgccaatatgctttacctgccac

SEQ ID NO: 121 - protein, 983 aa, Synechococcus sp.
MAGKAYWQAKIWGLLHDPALKALYGNPGRGEEGLWKKLACMEGWASPKSSEEKQASELSGTWLDHVGLCDLISSASDRGIIHYIGTAVDYGAEGLELSHLLSGEKLPLRLQNHAEILGQSSRKTYLEQTEADLIDQMPAEIRDDPEAAQACFWWLWRCLPQAVADEFGAASFLMPAETRLPDGSIWSHASMTAALAGALAGYDTELDDIPKGGQNTPKSHPYLAVFTFSPVQELIKASRKMKDFWAGSWILHYLSAKVCWRLAHKYGADCFLYPSLYGQPLIDHWLLQKHSEFEDWIQPPDDRQLLTAGFPNVIMLVLPEAQVAAAMQSAKNFLLDAWREIAKEVLAELQGDRHWQTNLSDTDPSWKGWLDAQWQTYWSAVAIGDKNSSFKSVGIPTQTSDKKADLEKWIEQQNKAFNGKLFTDTERDFFEKATAKFTEQRNRNYAGSLNAGSWWADICGQTRLALNTVKNARNWKLPTAFGTRSTISGLGPVVHPQGNGQHRDWLTEGEAQHYWQRDAGLFDGIEQLNATETVKRGLEKVLPKLLDRDPTELKAYYPDLTVGVAGYLKTQSEKNGEALNQYQDACRAIRTKITADHHEIANFVRQEWGIPWIDETHDPLFENLPHPRLLNAGWLVEELENLDKEAQKVYRQDLQNEIQKFYPQNNPASWYAIAAGDGDGMSDWLKGTKMEAYKEYFPKALNVPNDLKKSFDKFSDEAKRMGPATHNALSRALLDFSNKLAPYLTEERYAGRLIYSGGDDVLAYTNLWEWDQWLWDIRQAFRGDKDDCGEFNNQGHYWQADRFDRPLFTMGKNATISFGLVIAHHSVPLAIALENLWEAEEGAKDHEYEDFALEGKERKKKKDAVQLRVIYGNGNILKATCKFDTFRAWQQLLEITGLEASTFETAATLLEQHPIPTSVAIAPWVSAFVERRSNLNEEQKIGLQKYLAHFLQELWNTTNADDWDKESKNWLKAAAFNLRTRKV

SEQ ID NO: 122 - DNA, 2988 bp, Synechococcus sp.
tcatcggccgttcctccccaatttcacggtgcggttgcgcagcacaaaagccgccagcttgaaccagtttttgatctccagatcccactcctggggctgggcgggcaggctgtgctgccaaaaatgctggataaactccacaagcttgttctggaagtgctctttctgctccgattcctgtttgaagagatcccggcggctgcaaaagagcgtggcccaggctggcaccgcctctgggctgggggcaggatgttgctcccacagttgggctgcctgctcaaacaaggagctttgatcctgctgctggcccatgagcttccagtcaaaatcaaggagatccttccacttgtcgaacgtgtcgaacttgctggtgctcaccagttggttgccattggcaaacagcacccgcacctgcacgctgtctttggggcagccatgggcatagaggtggcccttggcttcttcttccgcctgccaaaggttttccagggcaatggccagaggcaccgagtgatgggcaatcaccacgccgaagctgatggtggctgcggatcccagggtaaagagggggcgccggctcaaaccttcgggaggccgcccttttttccactgccagtagtcccccaggttctcaaactcccgccagtcatcctctcccccccggaaacactggcgaatatcccacagccagccatcccactcccagaggttggtgtaggccaaaacgtcgtccccgccggcgtagatgagcttgcctgcgtagcgttgctctgttaggtagggcaccaactggccggaaaaatccagcagggcgcggcttagggcgctgtgggtggcaggccccatgcgcttgcggctgtttttgacaaacttctgaaaagcgtctttgacttgctccagctcctccttgtccttgccaaagacctcgccaatggcttccgtttgcccgttggccagccgctgtaggggttgaggcagatagtcgtagtaggatttcatcttctcgcccctgagccatttgcccatgtcgtccccatccccggcagccagcacgtaccaactggcggggttaacgctggggtagtagcggcctagaagcgtctcgatgtcctgccggtagcttctttgcgtttcctcgtccagctccaggtcttccaccagccaaccggcattgagcagacggggatggtagcgcaggttctgccggtcggcccacgggatcccccatttgccccgcatttcccgcagcacccctctgacctccgggtagcgggcctccactgcctgacaggcctgctcgaagtgctctcgttcccgtcgcccttgggttttgaggtagccggctacgccagccgtgagatccgggtaggaagcggcaatctggtcttcatccagctcgcggaagagctccggcagcactttgtacaagccccgcttgagggtttcggtggcattgagctgttcccggccatcgaagagcccggcctgccgttgccaaagccgccgactctccccttctgttatccacccctgccgcggtgagggatgcaccaccggccccaagcccgaaacggtgctgcgcggcccaaacgcaacggggagctgccaatcgcgggcctgcttacaagcggcttgtagccgccgactttgctccactgcggctgcccaccaagatcccacgttgagtccggccttgtattggcggcgctgttgtctttggggatcccagaagctaactcgcaagaactccagctcctcatccccgaagagcttttgcttggcctctaggtgatgggtgcggttttgggcactgacccagggatccgcatcaatggaaacctgagggggcctaaggatgccggtatccttgagggcatgagccggggatcccaggggcacggctgcccagtagtgctgccactggtgctccagccatccctgccaggtgggatcctctgggtgcaactgcctcagccagcggcgatccgcctgcaggtgatccagcaccctctgggccaactgcttccattcttccttgagggtctgctgggcaaactgcatggccgcctccacccgctcttctggcagcagcagcaggagcacattgggaaagccggcggtgagcagggcgttaggcgaaggctgagggatccattcttcaaattcggggtacttctcccgcagccagtagtcgattaatggctggccatagaggctggggtagagcagacagtcggggccgtatttctcggcaagccgccaacttatgcgagcagaaaggtagtgcagcagccaggagccagcccagaagtcccgcattttgcggctggctttgatcagctcctggatggggttgaaggtaaagctcaccaagaagggacgcgcgaacttgggctcgtcgtagccggccaaacatccggccaaggctgcggtgacgctggcgtggctccacagggatccgtctggcagccgggtttctgccggcaacagcagcaagctctcatccccaaactcctgacaaatagcttggggaaagcaccgccaaaaccaccaaaacactttttggggatccgtctcctgccgaacccaatcagggatggcgttctcctcccgttccatcaggtagtctgcacgggagtgggcattcttgagggcttggtgttgctcattggccaattgccaaaagtgcttgcgccccgagagcagatggctcatctccagtccagagcctaacccctggccgcgatcctcaacctggtagtcgatggctacaggcaaatggccaatggccgcgcggtcgctggccgaggcgatgagatcagcatcgcctatgggagaggatccctcggctttgggagaagaccatccctgcatcgccgccagtctggtccacagcccttccttggagcggccagtcctgtcgtgtagggctttgagggcgggatcatgtaacagaccccagagcttagcttgccagtagtaagacat

SEQ ID NO: 123 - protein, 995 aa, Synechococcus sp.
MSYYWQAKLWGLLHDPALKALHDRTGRSKEGLWTRLAAMQGWSSPKAEGSSPIGDADLIASASDRAAIGHLPVAIDYQVEDRGQGLGSGLEMSHLLSGRKHFWQLANEQHQALKNAHSRADYLMEREENAIPDWVRQETDPQKVFWWFWRCFPQAICQEFGDESLLLLPAETRLPDGSLWSHASVTAALAGCLAGYDEPKFARPFLVSFTFNPIQELIKASRKMRDFWAGSWLLHYLSARISWRLAEKYGPDCLLYPSLYGQPLIDYWLREKYPEFEEWIPQPSPNALLTAGFPNVLLLLLPEERVEAAMQFAQQTLKEEWKQLAQRVLDHLQADRRWLRQLHPEDPTWQGWLEHQWQHYWAAVPLGSPAHALKDTGILRPPQVSIDADPWVSAQNRTHHLEAKQKLFGDEELEFLRVSFWDPQRQQRRQYKAGLNVGSWWAAAVEQSRRLQAACKQARDWQLPVAFGPRSTVSGLGPVVHPSPRQGWITEGESRRLWQRQAGLFDGREQLNATETLKRGLYKVLPELFRELDEDQIAASYPDLTAGVAGYLKTQGRREREHFEQACQAVEARYPEVRGVLREMRGKWGIPWADRQNLRYHPRLLNAGWLVEDLELDEETQRSYRQDIETLLGRYYPSVNPASWYVLAAGDGDDMGKWLRGEKMKSYYDYLPQPLQRLANGQTEAIGEVFGKDKEELEQVKDAFQKFVKNSRKRMGPATHSALSRALLDFSGQLVPYLTEQRYAGKLIYAGGDDVLAYTNLWEWDGWLWDIRQCFRGGEDDWREFENLGDYWQWKKGRPPEGLSRRPLFTLGSAATISFGVVIAHHSVPLAIALENLWQAEEEAKGHLYAHGCPKDSVQVRVLFANGNQLVSTSKFDTFDKWKDLLDFDWKLMGQQQDQSSLFEQAAQLWEQHPAPSPEAVPAWATLFCSRRDLFKQESEQKEHFQNKLVEFIQHFWQHSLPAQPQEWDLEIKNWFKLAAFVLRNRTVKLGRNGR

SEQ ID NO: 124 - DNA, 2563 bp, Cyanothece sp.
ttaagcttttcctcctaatttaattttacggttgcgaagaacaaaagctgttagtttgaaccaactttgaacgtcttgatttaattgctcctctgaagtatttgtccacaaatcttctataaattttgatagggctgtttgaaagctttttctgatgtcatcattaagggtttctcgacggctacaaaaagcaactgtccaaggtttaatcgcctcttgaataggaataggatgttgagtccaaagggtggcggcttgttcaaataagctggcttctaactcatttattctgagtaattttttccattgttcaaacacttcaaatttgctagtggcttttaggatattaccgttaccataaattactctcacttgaacggcatccttataagttttatggttattttcgttaatgtaatgttctttggcttcttcttctgcttcccaaagattttctaaagcgatcgctaaaggaactgaatgatgagcaataacgattccaaaactaattgtcgcattttgacccattgtgaataagggacgctctgctaaatgattgggtttattttcttggttccattgccaataatttccttcgtttttaaattcacttttttctaaattaaatgtcccatcattattaaatcctagtggatctttatctcctcgaaaacattgacgtatatcccataaccaattatcccattcccataaattagtataagctaaaacatcatctcctccactataaattaatcgtcctgcatacctttcttcggttaaataaggaactaattggttagaaaaatcaagcaaagcacgacttaaagcattgtgagttgatggccccattcgtttaggtacggttaaaaattcgttaaaagcttctgcaatatctccttctacatttaagttttcaggagtgtaatgtccataagattttagtttgccacctttcaaccattcactcattccatccccatcaccagcagcaattatatagcaatcagtgggattattactaggataataatctttgactaatttttgtaatttaagtctattttcagccgtcgattctttttctaaatcttcgactaaccatcctgcattaagtaaacgaggatgatatttaatagtaggattagtatctgcccaaggaatcccccatttgtctgttatttcatcaggaattttattatgttctgctaaatattcgttaataactgctttagaggttttttcaaaatgttctaaatcttcacttgtgccatttttcaaatatccggccattcctgcggttaaatcaggataactcatttgaattttatcggcttctaattctaataatttaggtaaaactaaatgaagtcctcttttaactgtttctgttgcattcagttgttcaattccatcaaataatcctgcttgtcttttccataaagcttttgtttttccctcttcaatccaatcatcactaggatgaacaacagaacctaatccagaaattgttgaacgggtactaaaagctgttggtatttgccaatctctaccattttttacggcggttaaagctaaacgagtttgatcaaatatagctgcccaccaagaacctatattagtattaaaaggatatttgttttgctggtcttgacggagtttggctgctttttgtaaaaaagttaattctttttctaaaaataaagccgtattttcatttaatccataagcttgattttgaatggctacccaactacgatctttttcaataatttcactatctttaatttcttcattttctcgataaatttcactactggttaaggcaatcttttctaattgaccttcttgatcttcctgttttttatcaactccaataggaaccgccgtccaataggtttgccattgagattttaaccatcctttccaagttttatggtcaaaagatagtgacttcatccagtatctttcttctaactcactaaagactaatttgctaatatttaaccattcactaattaaggtacttttagctgtttgcatagcagtttctactttatctttgggaagtaccaagacaagtacattaggaaatcctgccgttaataaactgcgttgacttggttgcttaatccattgattaaatccgaatttactatatttttgtaataaccaatgatcgattaaaggttgttgatataaattaggatatataaaacaatccggtccgtaaatattcgctaatgtccaagaaactttggcagaaagatagtgtaaaatccaagaccctgcccaaaaatctcgcatttttcgactagctttgattaattcctgaataggggaaaaggtaaaactagctaaataaggatgggataaaggtttattggcttccccattttgagttaaatcttctgttgttaaatcataccctgataatgctcctgccatcgctgcggtaagactagcatgactccaatgtgaactatcgggtaaacgggtttctgctggcattaataatagtgaagcatcatcaaataattgacaagttgcttcgggaagacat

SEQ ID NO: 125 - protein, 853 aa, Cyanothece sp.
CLPEATCQLFDDASLLLMPAETRLPDSSHWSHASLTAAMAGALSGYDLTTEDLTQNGEANKPLSHPYLASFTFSPIQELIKASRKMRDFWAGSWILHYLSAKVSWTLANIYGPDCFIYPNLYQQPLIDHWLLQKYSKFGFNQWIKQPSQRSLLTAGFPNVLVLVLPKDKVETAMQTAKSTLISEWLNISKLVFSELEERYWMKSLSFDHKTWKGWLKSQWQTYWTAVPIGVDKKQEDQEGQLEKIALTSSEIYRENEEIKDSEIIEKDRSWVAIQNQAYGLNENTALFLEKELTFLQKAAKLRQDQQNKYPFNTNIGSWWAAIFDQTRLALTAVKNGRDWQIPTAFSTRSTISGLGSVVHPSDDWIEEGKTKALWKRQAGLFDGIEQLNATETVKRGLHLVLPKLLELEADKIQMSYPDLTAGMAGYLKNGTSEDLEHFEKTSKAVINEYLAEHNKIPDEITDKWGIPWADTNPTIKYHPRLLNAGWLVEDLEKESTAENRLKLQKLVKDYYPSNNPTDCYIIAAGDGDGMSEWLKGGKLKSYGHYTPENLNVEGDIAEAFNEFLTVPKRMGPSTHNALSRALLDFSNQLVPYLTEERYAGRLIYSGGDDVLAYTNLWEWDNWLWDIRQCFRGDKDPLGFNNDGTFNLEKSEFKNEGNYWQWNQENKPNHLAERPLFTMGQNATISFGIVIAHHSVPLAIALENLWEAEEEAKEHYINENNHKTYKDAVQVRVIYGNGNILKATSKFEVFEQWKKLLRINELEASLFEQAATLWTQHPIPIQEAIKPWTVAFCSRRETLNDDIRKSFQTALSKFIEDLWTNTSEEQLNQDVQSWFKLTAFVLRNRKIKLGGKA

SEQ ID NO: 126 - DNA, 3084 bp, Cyanothece sp.
gtgagtcatctgtatcatccgtattggcaagcaaaaatttgggcattactgcatgatccagccttaaaacccttatcggatcgatatggttttgcgagagaggggcaatggcagttattgcgatgtatgcaaggatgtaagtcccctaaagataacaaaaaggtgttaggagactgtgtattgcagggtaactggttaaaccatgtggggttatgtgatttagtcgcttcggccagcgatcgcagtaccatcggcagactcgatccacaatatagcgcagttacctatcaacagcaaaccggcttacagatccgtcatttattatcaggagaaccccaaaaccttaaagttaataataactggcaagaaaacttaattactaaacggaagaaactagaagcaaaagaagcagaatttttagataaaattagccagtgggaagatccaaaaaaagttttttgggcgttatggagatgttatgctgaagtcttagaaaaagaagaagctttaatacatttattaccagcagaaactcgtttaccggatggatcattgtggagtcatgtgagtatgacttctgcattagctggagggttagccgggtattataaacaagctgaaaattatcctattaaaaaccaaaaatttaatgattattctcgaccgtatttagttaattttaccttttctcctgtacaagaattgatcaaagcgagtcgcaaaatgcgagatttttgggcaggatcttggattttacattatctttctgctaaggtttcttatgcgatcgctaatgaatatggtcccgatactttactctatccttgtctgtatcaacagccattaattgataactggttattagaagaatattctgatttcaaggaatggatagaacctcataaacccgatcaattattaacggcaggtttccctaatgttattattatgattttacccaataatcataaatctcaacaggatctaaaagataatcctatttatgcagcgactcagttagcaaaacgtactttaaaagaagaatggaaaaagttaggagatcaaagtttagaatttttacaagatagtaaacagtggcaaaatattaacccaaatacttgggataaatggttaaagtgtcaatggcaaacttattatacagcctttcctattggtgatcctgagagtgacttaacttgttctttaagagtgggtaaaaatgaaacggaagagcaaaaaaaagacgcttttgaagcttggtgtcatcaacaaaatcagttaaccaacccgaaagaatctttatttgaaaccaatgaagagaaatttttaaaagctatctttaaactaaccgatatagaaacagaaaaagaaccaccaaaaacaaaatatagtaagcaacctaacttaaatgtaggatcatggtgggcttatgtttttgatcaattaagaaccagtttaaatgcagttaaaaatgctagaacttgggaacttcccacagcctttaccgttcgttctagcttatcaggaatcggttctgcagttcatcctattgtcaatgaagagaaacccgatcgcatttctgaaaaagaaattaacgagttttggtcagaaaaattcggtttatttgatggtactgaaaaactcaatgcaacggaaattgtcaagcgagtgttacataaattattacctgagatattgaactatgaagaacaagaaatcagcttatattatcctgatttaaccgccggagtcgccggttatttaaaaaatgcactattaaacaatcaacagtcagaaattgattattataaacgttcttgtcataagatttacaaagaaattcaaccgcttttagataatgataaccttagccaaagttggggtattccttggattaataataataaagaattgaaactgagtaataccattcatcatcctcgtttactcaatgcaggttggttactcgaagatgtagaaatatcccatgatagtaatatagagtatcgagaaaaattagaagaattaagtacaaaaagaacaactatacaacaagttatcaataaatattatcctagtaataatcctaccaattggtatattttagttgctggtgatggtgatagtatgagagactggttaagaggtagtaaattaaaaaattatggtgaatatttgcccgatgaattaagagaaaaaattattaatgatagtaatgatgaaattcctaaagaatataaagaacccttacaaaactttctcgaagttagaaaacgtatgggaccatcaacccatagtgctttaagtcgtgccttacttgacttttctaatcaattagttccttatttaaccgaacaaagatacgcaggaagattaatttatagtggtggcgatgatgttttagcttatacaaatttatgggaatgggacaactggttatgggatattcgtcaatgttttaagggtcaagaagatccctataatgagtttaaaaatgagggtgactattggcaatggaataaaccaaataaacccaaaaatatagcccaaagacctttatttacaatgggaaaatgtgctactattagctttggaattgtgattgctcatcactctattccgttagcgatcgctttagaaagtttatgggaagcagaagaagaagctaaagaacattacacacaaaaagataataaagacacttacaaagatgccgtacaagttcgagttttgtatggtaatggaaacaccttaaaatctacatcaaaatttgatatttttaaccagtggaaacaactgctaaaattagacttagaacccagtttatttgaacaagctgctaccatttgggaacaacatcctatcccagataaaagtgcaattgaaccctggacaaaagccttttgtagtcgtcgagatataggagaagaattacaacaagactatcaaaaaatattaaccagttttattcaaggattatggataacgacccctcaaaataacttagataaagaggttaagaactggctaaaactggcagcatttgtgaaacgaaatcgtaaaattagcttaaaccaggagtaa

SEQ ID NO: 127 - protein, 1027 aa, Cyanothece sp.
MSHLYHPYWQAKIWALLHDPALKPLSDRYGFAREGQWQLLRCMQGCKSPKDNKKVLGDCVLQGNWLNHVGLCDLVASASDRSTIGRLDPQYSAVTYQQQTGLQIRHLLSGEPQNLKVNNNWQENLITKRKKLEAKEAEFLDKISQWEDPKKVFWALWRCYAEVLEKEEALIHLLPAETRLPDGSLWSHVSMTSALAGGLAGYYKQAENYPIKNQKFNDYSRPYLVNFTFSPVQELIKASRKMRDFWAGSWILHYLSAKVSYAIANEYGPDTLLYPCLYQQPLIDNWLLEEYSDFKEWIEPHKPDQLLTAGFPNVIIMILPNNHKSQQDLKDNPIYAATQLAKRTLKEEWKKLGDQSLEFLQDSKQWQNINPNTWDKWLKCQWQTYYTAFPIGDPESDLTCSLRVGKNETEEQKKDAFEAWCHQQNQLTNPKESLFETNEEKFLKAIFKLTDIETEKEPPKTKYSKQPNLNVGSWWAYVFDQLRTSLNAVKNARTWELPTAFTVRSSLSGIGSAVHPIVNEEKPDRISEKEINEFWSEKFGLFDGTEKLNATEIVKRVLHKLLPEILNYEEQEISLYYPDLTAGVAGYLKNALLNNQQSEIDYYKRSCHKIYKEIQPLLDNDNLSQSWGIPWINNNKELKLSNTIHHPRLLNAGWLLEDVEISHDSNIEYREKLEELSTKRTTIQQVINKYYPSNNPTNWYILVAGDGDSMRDWLRGSKLKNYGEYLPDELREKIINDSNDEIPKEYKEPLQNFLEVRKRMGPSTHSALSRALLDFSNQLVPYLTEQRYAGRLIYSGGDDVLAYTNLWEWDNWLWDIRQCFKGQEDPYNEFKNEGDYWQWNKPNKPKNIAQRPLFTMGKCATISFGIVIAHHSIPLAIALESLWEAEEEAKEHYTQKDNKDTYKDAVQVRVLYGNGNTLKSTSKFDIFNQWKQLLKLDLEPSLFEQAATIWEQHPIPDKSAIEPWTKAFCSRRDIGEELQQDYQKILTSFIQGLWITTPQNNLDKEVKNWLKLAAFVKRNRKISLNQE

SEQ ID NO: 128 - DNA, 2826 bp, Synechococcus sp.
tcatcgaccgttcctccccaaagtgacggtgcggttgcgcagcacaaaggccgccagcttgaaccagtttttgatggccagatcccaggcccccggctgggcgggcaggctgtgctgccaaaagtgctgaataaactcgaccagcttggtctggaaacgatccgtctgctcgctttcgccgtggaagagatcccggcggctgcagaacaggcgggcccaagcaggcaccgcttccaggctgggggctgggtgctgctcccagagctgggcggcgtgttcaaatagggagctttgatcctgcttttggcccaacagcttccagtcaaaatccagcaggtctttccacttgtcgaaggtgtcgaacttgcaggtgctcaccagttggttgccgttggcaaacagtacccgcacctgggcgctgtctttggagctgccctgggcataggcctgctctttggcgccttgttctgcctcccagagattctccagggcaatggccaggggcaccgagtggtgggcaatcaccaccccaaagctaatgctggccagggatcccagagtaaaaagagggcgacggctgaggccagccggcaactgcgccttttgccactgccagtagtccccttcgttggcaaactcgcgccagtcgtcttcgccgccgcggaaacattggcggatgtcccagagccagccatcccactcccagaggttggtgtaggccaaaacgtcgtctccgccggcgtagataagcctgccggcatagcgctgctcggtgaggtagggcaccaactggccggaaaaatccaacagagcccggctgagggcgctgtgggtggccgggcccatgcgcttgcggctggctttaacaaactcgctgaaggcgtccttgacttgcttgagctcttcagagtcgaggacgcggccaatagcgtccctctggccatccgctaggcgctgcagcggctggggcaggtagtcgtagtagggcttcatcttccccccgctcagccactggcccatgtcgtcgccatcgccggcggccaccacgtaccaactggcggggttgatgctggggtagtagcggctgagggtggcttctatctcctggcggcagcgcttctgggttgcctcgtctgcttccaggtcctccaccagccagccggcgttgagcaggcgggggtggtagcgcaggttttgctggtcggcccacgggatcccccacttgccacgcatctcccggatcacctcccgcatgccggggtgaatggcctcaacggcgcggcaggcctgctcgaagtgctccagctcgcgtcgcccgtgggttttcaggtaaccggccacgccagcagtgagatctgggtaggaagcggcgacctcgtcttcgtcgagggtggggaagagctccggcaacaccttgtctagggcccgcttaaccgtttcggtggcgttgagctgctcgcggccatcgaaaagccctgcctggcgctgccaaagccgccggctctccccttcgctaatccagcgattcctgggggaagggtgaaccaccggccctaggccagagacggtgctgcgcggcccaaaggtcaccggcaactgccaatcgcgggcctgtttgcaggctgcctgcagccggcgcgtcgcctccactgccgctgcccaccaggagcctacgtttagccctggcttgtgctggcggcactgctgcctttcgggatcccagaagctgatccgcaggaacttcagctccggatcggcaaaaagctgccgctttcctttgagatggtaggtgcggttttgggcgctgacccagggatcccgctcaatggactcctgggacctgaggatggcggtgtctttgagcctttgctggggggatcccaggggcgctgccgcccagtagaactgccactggtgctccagccatcccccccaggtgggatcttctgggcgcaactgcaccagccagcggcgctccagttgcaggtgctccagcgctctttccgccaggtggcgccattcttctttgagggtctgctgggcaaactgcatggccgcctgcagccgctcttcgggcaacagcaagaggatcacgttggggaagccggcggtgagcagagtgttggcagaaggctgcgggatccactcggcaaagggggggtacttctccagcagccaagcgtcgatcaaaggctggccgtagaggctggggtagagcaggcagtcggggccgtatttctccgccaggcgccagcaaagccgcgccgagaggtagtgcaacagccaggatccggcccaaaagtcccgcatcttgcggctggctttgatcagctcctggatggggttgaaggtcaagctggccaaaaagggccgcgtgaacttgggctcgtcgtagccggccaaacagcccgccagagcggccacgacgctagtgtggctccacagggatccatcgggcagccgcgtttctgccggcaaaagcaggaggctttcatcgccaaactcccgcgccagcgcctggggaaaacagcgccagaaccaccagaacaccttctggatatcctcctgttcttgccaaatccagtcgggaactacccttgcttcctgcgccagcaagtactcggcgcgggagctggcctgccgcagggcgcggtgttcttcttcgggcagttgccaaaagcgcttgcgccccgaaaggagatggctcatctctaagcccggccccaggctctggctgcaatcagctacctggtagtcgatggcaaccggcaggtggccgatagcagcccgatcgctggcggaggcgaccagatccgcatctcccac

SEQ ID NO: 129 - protein, 941 aa, Synechococcus sp.
MGDADLVASASDRAAIGHLPVAIDYQVADCSQSLGPGLEMSHLLSGRKRFWQLPEEEHRALRQASSRAEYLLAQEARVVPDWIWQEQEDIQKVFWWFWRCFPQALAREFGDESLLLLPAETRLPDGSLWSHTSVVAALAGCLAGYDEPKFTRPFLASLTFNPIQELIKASRKMRDFWAGSWLLHYLSARLCWRLAEKYGPDCLLYPSLYGQPLIDAWLLEKYPPFAEWIPQPSANTLLTAGFPNVILLLLPEERLQAAMQFAQQTLKEEWRHLAERALEHLQLERRWLVQLRPEDPTWGGWLEHQWQFYWAAAPLGSPQQRLKDTAILRSQESIERDPWVSAQNRTYHLKGKRQLFADPELKFLRISFWDPERQQCRQHKPGLNVGSWWAAAVEATRRLQAACKQARDWQLPVTFGPRSTVSGLGPVVHPSPRNRWISEGESRRLWQRQAGLFDGREQLNATETVKRALDKVLPELFPTLDEDEVAASYPDLTAGVAGYLKTHGRRELEHFEQACRAVEAIHPGMREVIREMRGKWGIPWADQQNLRYHPRLLNAGWLVEDLEADEATQKRCRQEIEATLSRYYPSINPASWYVVAAGDGDDMGQWLSGGKMKPYYDYLPQPLQRLADGQRDAIGRVLDSEELKQVKDAFSEFVKASRKRMGPATHSALSRALLDFSGQLVPYLTEQRYAGRLIYAGGDDVLAYTNLWEWDGWLWDIRQCFRGGEDDWREFANEGDYWQWQKAQLPAGLSRRPLFTLGSLASISFGVVIAHHSVPLAIALENLWEAEQGAKEQAYAQGSSKDSAQVRVLFANGNQLVSTCKFDTFDKWKDLLDFDWKLLGQKQDQSSLFEHAAQLWEQHPAPSLEAVPAWARLFCSRRDLFHGESEQTDRFQTKLVEFIQHFWQHSLPAQPGAWDLAIKNWFKLAAFVLRNRTVTLGRNGR

SEQ ID NO: 130 - DNA, 3330 bp, Arthrospira maxima
atggacaactttctcggttctcttaatcattcctcactgtgcaatatcgtcttccttcgcaaactttgtgctttagttggtgatcgccatctctgtaacagcctggattgtttgaaaacctcggagggacaagcggcgctgttttggtgggaacaaaatcaacatcagcttgaagcgatcgccagttcctcagatcgggtcaatttggaaccaggaagctcaacagaacgacaaactaaagaacggatcattaaacatcccatcagcgctcaacagcaaaccattcaaactccagacaacagagaaatcgcctttccccaatgggttcaacaggaacaaaacccccaaaacgtatttaattggttgtggcgtatgatgccggaactaagacgacaacaggattcggacgctctactcgaccctcaacactacattttacccgactgtccgattcatagctatcgtgccacagtctcagcgatcgccggagcggtagactttgatgaacgggggattgtcactcaatacccttacttgctgctgtttaccttttccccgattcaggactttatcaaagcttcccgcaaatttctagacttttgggcagggtcatacttgctacactatctaagcgctcaactctgttggttcgtggctgaaacctacggtgtagatgcggtgattaccccctcgctttggggacaagaaatcatcgacgcactcttactcaaaacctatccaatttttagagaaagctttcaagaactcagccccgatggaacagaccccctgactcgttttaatgagcgtttgagtaccaccctagcaaccgcaggctttcccaatacgataaccatcttagttggaagctccgaaaccgcacaacaactcggagaaactttgtgtgaaaaattgcggtctgaatggagtgcgatcgcccaaaatattagagaaggaatccccgatcatcccatacccgaacttagacaaggaattcgcgatcgcaccatcgcatttctgcaaaacccccaaaatcataagcggattgagaagatcttagaagaattttcccagtcgggaggtcacgacgaacaaaaccgacatgatctcgaaaactggaagcggaaaagctgctgggaatggcggggattatggaatgctcaaattgaccaaacttggcaaccctactggacggctgttccgttgggtgatccgaatacttctctaatgattgagaaaaatgatgacgatcaattgagcgaagactggatcaaaaaacaagaaaaagtggctcaaactcgcgtgatcaatccccctcccacaacggcggaaaaaatgctctacacaaccctcaataatgggacttggtgggggtcaattcaatctcgatgcggtcaagccattcaagccattaaaaatactagaacttgggcaattcccatttctccgggtgttcgttctacattatcgggacaactgagcgccctacatcctcaatttcgatattctggaaacttccgggaaggatacggtttacctattgaatcaatgcgattattttggcgattaatagcagaagtttatccaggattatttgacggctcggaaatgctgaacgctctagaattaacgaagcgcatggcttgggtttatggtggtgtgggtgagtctttaggaattgattttagcaatttagaaaatgaaaaaatagactatagccaattaattcgctttcccaatctcagttctattgcttcagcccgatttgcttaccaagatttgcaacaagatcaaaatcacggtaaactcagtcaatattggcagaaattacaaattaatatcaaacaacaatttgggaaaaccagtcaagaatatcaggattttctggctcaaactcggggtcgtcctttccacatccctaaaaccgatatttgtattaatcgccaaaatttaccggggcgatactataacggcgtgatgttttctagcaaatggcttgccgaagatatgggattagaaaaagaacagagacccgagttgcgaaagattgtagacctaactcactccgaatgtggctttggcgacagtagcccaacagattggtgggtgatgatcttaggagatggggatggtatggggcaatatgtttccggtaaaaaacttcatccttaccaagaatatttaaccgaaactcatcccgaaactttcatcgatcgcgatcgctatcccgacctagatgaaaaccagtatgagcagaaaaaacggcagttcattaaagcctttagagatgataaacattccctgctgaaaacccgtaagcgcatgggacccgccactcatgttggtctaaaccgcgccctgctagacttctctaaccgtttagttccctttattaccgaaaagcggttttgtggtcgcgtggtctacagtggcggagatgatgtgatgacggtactccctttagaagatttacccgattatctgctctctctgagagccgcttggtgtgggggcgacgacccctatcaaccccaagcgggcgatccagacttgaaatttcaatcccaaggcggctactggcgacccacttcggatacaaatgattttcaaggcttaccagaccgatcgctgtttacgatgggattcggggcaacgatgagtctgggtatcgtgatcgtcgataaaagtgttcccctcccagtcgccctggaagccctttgggaagcagaatccgaccgggctaaagaattatccggtggtctactgatgtccatcgatctgttgcggggactgacggaatggcgatcgctatctttgatgcgatttgtcctgtctgaaattttccgtttatcgagtgttcccaacaaaaacggcctatgttttcgagttctctacagttcaggaaacaccctagaagctctgatcaaaggagaattatacgccggttggcgagattggatcaccactgaacatcatcaagccttgagttctctactctatcgcctcgccgaagaactcccccgccatgcggatttgaccccatcttcttacttaattgctcaagccgccagagcgatcgccttacgccgagacgacaaagacttggttcaagaaaatatcgacaaactgttgatctggctcagatattgggaagattgggcgcgatcagtccatgttcaatggttaatcgaccgggagaaaaaccccgatactcccaaaccaattggaattgaccttaaggacttaagtaatattctgcgtttttcggcgttttggctcgataaaatgcagcaacgccaacaatggcacagacaggatcaggaggcttag

SEQ ID NO: 131 - protein, 1109 aa, Arthrospira maxima
MDNFLGSLNHSSLCNIVFLRKLCALVGDRHLCNSLDCLKTSEGQAALFWWEQNQHQLEAIASSSDRVNLEPGSSTERQTKERIIKHPISAQQQTIQTPDNREIAFPQWVQQEQNPQNVFNWLWRMMPELRRQQDSDALLDPQHYILPDCPIHSYRATVSAIAGAVDFDERGIVTQYPYLLLFTFSPIQDFIKASRKFLDFWAGSYLLHYLSAQLCWFVAETYGVDAVITPSLWGQEIIDALLLKTYPIFRESFQELSPDGTDPLTRFNERLSTTLATAGFPNTITILVGSSETAQQLGETLCEKLRSEWSAIAQNIREGIPDHPIPELRQGIRDRTIAFLQNPQNHKRIEKILEEFSQSGGHDEQNRHDLENWKRKSCWEWRGLWNAQIDQTWQPYWTAVPLGDPNTSLMIEKNDDDQLSEDWIKKQEKVAQTRVINPPPTTAEKMLYTTLNNGTWWGSIQSRCGQAIQAIKNTRTWAIPISPGVRSTLSGQLSALHPQFRYSGNFREGYGLPIESMRLFWRLIAEVYPGLFDGSEMLNALELTKRMAWVYGGVGESLGIDFSNLENEKIDYSQLIRFPNLSSIASARFAYQDLQQDQNHGKLSQYWQKLQINIKQQFGKTSQEYQDFLAQTRGRPFHIPKTDICINRQNLPGRYYNGVMFSSKWLAEDMGLEKEQRPELRKIVDLTHSECGFGDSSPTDWWVMILGDGDGMGQYVSGKKLHPYQEYLTETHPETFIDRDRYPDLDENQYEQKKRQFIKAFRDDKHSLLKTRKRMGPATHVGLNRALLDFSNRLVPFITEKRFCGRVVYSGGDDVMTVLPLEDLPDYLLSLRAAWCGGDDPYQPQAGDPDLKFQSQGGYWRPTSDTNDFQGLPDRSLFTMGFGATMSLGIVIVDKSVPLPVALEALWEAESDRAKELSGGLLMSIDLLRGLTEWRSLSLMRFVLSEIFRLSSVPNKNGLCFRVLYSSGNTLEALIKGELYAGWRDWITTEHHQALSSLLYRLAEELPRHADLTPSSYLIAQAARAIALRRDDKDLVQENIDKLLIWLRYWEDWARSVHVQWLIDREKNPDTPKPIGIDLKDLSNILRFSAFWLDKMQQRQQWHRQDQEA

SEQ ID NO: 132 - DNA, 2934 bp, Halorhodospira halophila
atgacggaggcaaccctcatggacattgatctggcccggaacaagctgctcgcccgactgcacgacccggcggagaaggcgctggtcctgctgcgcgatcccgccggccacgaggggggcaccgtgcgcaccctcatcgaggagatcctcggcgaggtgccgcaggcggcctgggcgcccgtgcgcaaggccgaccgctgggcctcggcggcggaccggccgcaattcccccgtgagcgcgacggcgatcgcttcgcgcgctggagccaggtgcgcttcgccgagcagccggtgctgcgccatccgctcaccggcgagaagatcgatctcggcgagcacggcaagctgcgggagatcgagctcgacacgctcaaggccggcagcctcgagcatttccggcacctgatccatcgtgacgaggcggggagcgtcgattcctggcggaccctgctcgcgctgtggcgcttcggccccgagccggcaacgagcggcgatgcgaccgggctcggcgagctgtggcgctatctgccggcggatacccgcatcccggaccacaccatctggcagcacctggacctgagctccgcgctcaccggcgccttcgcgggcgatggccagggccgctgcgccctgctcaacgtcaccctcggcccggtgcaggagctgatcgccgccgcccggacgacctcggacctatgggccggctcgcacctgctcgcccggctcgcctgggaggcgatgcgcgtcgtctgcgagcgcctcggccccgacgccgtgctcttcccgcagctgcgcggcgtcccgcaggtcgacctctggctcctcgagcaggggctggcgccggagctcttcgcgaaggagccctggaacgagcgcaccgtcaccgacgccaacccgctgttcagcgccgccctgcccaaccgcttcctcgccgtggtcccggcggatcaggcggaggcgatcggccgcgccatcgaggcgcacctgcacgagtgggtcgccgagaccgccgagggcgtggtcagcgatctgctcagggccgtcaacctgcacaccgatccgacaacacccgcctatcagcaggcacgggagcagctggccggattccctgaggtctactggtcggccgtgggctgggacgagatcgccacggacgccaacggcgagcccgaggcggaccgcctcgccgaggccctgcgccccttctatgagccgcaggccgaggcccccggcttcctcagctccgaggcctggcgcgtactacagcggcccatcgaggtcatcgatccggaagcggggacgccggcgaccttctaccggcccaatcccggcgtgctctaccccgcgctctacgagctcagcgagcgagtgatgggcggcgtcaaggcgacccgccccttcgccgcgcagcacgagggcggctatcgctgctcgctgaccggcgaggtggagtggctgacccacgatcgcagccacctcgacctgccgccgggccagcgggaagggcacgacaccctctggagcctcgttgccaagcgccacccgagctgggcgcgcaagggtgagcacctcggggcgctggccgccctcaagcggctctggccgcagcgcttctgccgcgaactcgccgggaccctcgggcaggagcagacgccgcgcttcgtcgtctccacgcacaccatggcgctggccacctccctggcccgcgctgccgaggagccgaatcccgccggcgggctcagcgccgagcaggccgaggcgatccgcaacgccgatcgggttgcgctaccgcggcggctggcgcagcggctacaccacctcgagcacggtgagctcctcgcccggttgcccggctgggtcgagcagcagcgcgaatccgacgacggcgatgagaccgccgcccggcaggcgatccgcaaggtcaccggcaccgaggccgaggcctactacgccctgctgctcatggacggcgaccgcatgggggcctggctctccggcggcgacgggacgaccatcccctaccgggcggccttccaccccgacctggcggacgcagtggacacacgcttcggcgaccatacggtcctgcaggcgtacctcgacacgccgcgggcggtctcaccggcccggcacctggccatctccggggcgctgaacgacttctccaccaccctcgcccgcagggtggtcgaggagtgtcaccacggccgcgtcctctatgccggcggcgacgacctcatggccatgctgcccactggcgatctgctcagcgccatgcgcgagctgcgcgacgcttactcgggcacggctaccagcggtgaggccgaggaagaggacgcctggtgccgcaacggcttcatctatcggcaggaccggctgtacctgaccatggggtcgcaggccaccgcctcgatgggggcggtgatcgcccaccataagacccctctgaccgcggccctcgctgaactgcgccaggccgagcagcgggccaagaacgagggcgggcgcgacgccttcgccctgtccgttctcaagcgcagcggcggcgccctgcgccacgtcggccgctgggcaccagcagcgggtatcgacgagatgagcgccctgcgcgacttcgccgaggcgctccatgccaaccccgaggcctcccggcgcgccgcctacaacgtcgcgggctggctcgccgatctccccgagcccgacaccctccccccggaggacggcgtcgccggctacctcgaggcggtgctgcactaccaattctgccgccagggcctcgagcagcaggggcagcccatccacgcgcggcggctcggatcgctcgccagcgtctcgccaaccggcgacgagctgagcagcgccgccaagatccgcgaccgtctcagccacctcgtcggcgtggccgagttcctcgcccgcgagacccggaggtag

SEQ ID NO: 133 - protein, 977 aa, Halorhodospira halophila
MTEATLMDIDLARNKLLARLHDPAEKALVLLRDPAGHEGGTVRTLIEEILGEVPQAAWAPVRKADRWASAADRPQFPRERDGDRFARWSQVRFAEQPVLRHPLTGEKIDLGEHGKLREIELDTLKAGSLEHFRHLIHRDEAGSVDSWRTLLALWRFGPEPATSGDATGLGELWRYLPADTRIPDHTIWQHLDLSSALTGAFAGDGQGRCALLNVTLGPVQELIAAARTTSDLWAGSHLLARLAWEAMRVVCERLGPDAVLFPQLRGVPQVDLWLLEQGLAPELFAKEPWNERTVTDANPLFSAALPNRFLAVVPADQAEAIGRAIEAHLHEWVAETAEGVVSDLLRAVNLHTDPTTPAYQQAREQLAGFPEVYWSAVGWDEIATDANGEPEADRLAEALRPFYEPQAEAPGFLSSEAWRVLQRPIEVIDPEAGTPATFYRPNPGVLYPALYELSERVMGGVKATRPFAAQHEGGYRCSLTGEVEWLTHDRSHLDLPPGQREGHDTLWSLVAKRHPSWARKGEHLGALAALKRLWPQRFCRELAGTLGQEQTPRFVVSTHTMALATSLARAAEEPNPAGGLSAEQAEAIRNADRVALPRRLAQRLHHLEHGELLARLPGWVEQQRESDDGDETAARQAIRKVTGTEAEAYYALLLMDGDRMGAWLSGGDGTTIPYRAAFHPDLADAVDTRFGDHTVLQAYLDTPRAVSPARHLAISGALNDFSTTLARRVVEECHHGRVLYAGGDDLMAMLPTGDLLSAMRELRDAYSGTATSGEAEEEDAWCRNGFIYRQDRLYLTMGSQATASMGAVIAHHKTPLTAALAELRQAEQRAKNEGGRDAFALSVLKRSGGALRHVGRWAPAAGIDEMSALRDFAEALHANPEASRRAAYNVAGWLADLPEPDTLPPEDGVAGYLEAVLHYQFCRQGLEQQGQPIHARRLGSLASVSPTGDELSSAAKIRDRLSHLVGVAEFLARETRR

SEQ ID NO: 134 - DNA, 2721 bp, Thermoanaerobacter italicus
ttatttctcacctcctcgattcaaaaaagctaatatcgttaagaggctaataaaattgtcgtattttacctctttatacagagaatatagtaaaatgtataaatctctttcaactttttctttttcatctttacttaagttctcattcaatgaacgtttaatatttcttttgagctcactaataaaaatgccttgtggaagagaatctacatctagcctttccaaagctgcttttaattttccaacaaaagaaatacttaatttgtcttctttaaaaaaggaatttatatcttttaataaacctattgttccttctttatttcttgcatcatcataattccacttggctctggcaatgtaattctcaccagaatgcaaaataagttttattgcaaaggcatcctttccttctactttttttgcatattcttcctctacctcatctacagaagctataacattttttaaatcttctttataatgagctataactacccccattgacgccgtggctttgtttcccatcatcacatcaatttcctcttttcgttccacaaatccggcatctattgtaaaatctggaattatctcattattaacaattaagtgcccactgaaagccgccctaagttttaccataacatctaataaataattaagatttactattgcaaatacatcatctccgccagaatatattacttttcctgctcttgtctcttccactatttcttttacatatttcaaagaatagttcttaagtgcctcactaattaaagagtgaacagctggtgtcattagtcgctttttatccttgattttttctttaaaatcttctggtaaaaaaccctgcaatttactgtggtacatttctaacatatagggtgccaattctcctgctaaccatttccccatgttatcgccatcaagctttataacggcataatatttctttttattcagtcttatgtctttaattcttttatcaatactctttaataattctttaagtttgcctaatctttttgaattaaaatcataagttttaaaataattttcattgagattttcctcatacaacaattcataatcaaagttatcaccgcaccactttttgaatacttctttgtatctttttatatttgtttttaggtcattatctgaattgttaattatatctagtaatgctatctctgcagtagagggaaaactttcttctatgttgtttttcccaaacatatctttaaaatatatttctgccgccctttttgtcaggcatctgctgcacaacccttctccttgtgctaaatacttataagtaatacttttatcatcactttttttgattattgcattttgttctctaagaagtttaatcttataactttctttccctttttctatcttttcatcttcttctctcgtacacctgtagataataacattgtgctcaccgcatatagaacattttcgccctatttcttcatattgattgaagtttcttatgccttttcttgtccccatcattttctccataaaagaataaagtaacccataaatattaccaatgttaggcccgtattcacctttatctttaatatatctcaataaatcctttatctcttccacctcatcactgttaaaataatcctttatcttatccaattggatttcccaatcaggcctgtttacatccccattttctaaaggcaacgccacccaatacacatctggaaagtttgataattggcgtaaaagcaattttttttgctcatcattgctttttacaagatgactaaaaacatattccccgatttttatatattcatcttttactgtttttttaagatttagtaacctaatttcttctacattttttgttggtaaaattgcaaaaaatctgttgggaagagtaggagttttaaggtctttagtcgtagttgcactgttattaaatagctttgctatccaaaaatcgcacaaaggctgttctttaagttcagggaatattatagaatctggtccataagcttctataactttttctattgccacccacgttaaataagacaaaatataacttccccaatacaagtcttgtgtcttccttgcctgcacaatatattcttgaacaggacctattgtaaaaataaatagtgtcatattgtttaaattcaattcattataaaaatatgcattcaccgcagatgccaatttcaaatgctcaaatattgtgtgattaggaaatcgagtatcagcaggagctaaatcccaatattttctatattcacttggcgtatgtttctttaaaagctctttcaaataacgccataaatacacaaattttttataactatctttaaagtctagttttgataactcatctactgcttcatctacagcctttttaaacacttctttttctataacaaaattattatatcgattagctgcaagaggatgaacaaactcaggttgttcttcaaaaacaacttgtaaatttttatttttactggcatctttaggtatataatatctttccataaatgaagctaaaacatctgaagcaatagttttgtggtaaggaatatctatttttttagatatttccttagctcttttctcatggttttcacctgttaacaaaataaatggcttatctggagaatcatgaaaatatgctttcaatttattttcaaataactcttctttcttactcat

SEQ ID NO: 135 - protein, 906 aa, Thermoanaerobacter italicus
MSKKEELFENKLKAYFHDSPDKPFILLTGENHEKRAKEISKKIDIPYHKTIASDVLASFMERYYIPKDASKNKNLQVVFEEQPEFVHPLAANRYNNFVIEKEVFKKAVDEAVDELSKLDFKDSYKKFVYLWRYLKELLKKHTPSEYRKYWDLAPADTRFPNHTIFEHLKLASAVNAYFYNELNLNNMTLFIFTIGPVQEYIVQARKTQDLYWGSYILSYLTWVAIEKVIEAYGPDSIIFPELKEQPLCDFWIAKLFNNSATTTKDLKTPTLPNRFFAILPTKNVEEIRLLNLKKTVKDEYIKIGEYVFSHLVKSNDEQKKLLLRQLSNFPDVYWVALPLENGDVNRPDWEIQLDKIKDYFNSDEVEEIKDLLRYIKDKGEYGPNIGNIYGLLYSFMEKMMGTRKGIRNFNQYEEIGRKCSICGEHNVIIYRCTREEDEKIEKGKESYKIKLLREQNAIIKKSDDKSITYKYLAQGEGLCSRCLTKRAAEIYFKDMFGKNNIEESFPSTAEIALLDIINNSDNDLKTNIKRYKEVFKKWCGDNFDYELLYEENLNENYFKTYDFNSKRLGKLKELLKSIDKRIKDIRLNKKKYYAVIKLDGDNMGKWLAGELAPYMLEMYHSKLQGFLPEDFKEKIKDKKRLMTPAVHSLISEALKNYSLKYVKEIVEETRAGKVIYSGGDDVFAIVNLNYLLDVMVKLRAAFSGHLIVNNEIIPDFTIDAGFVERKEEIDVMMGNKATASMGVVIAHYKEDLKNVIASVDEVEEEYAKKVEGKDAFAIKLILHSGENYIARAKWNYDDARNKEGTIGLLKDINSFFKEDKLSISFVGKLKAALERLDVDSLPQGIFISELKRNIKRSLNENLSKDEKEKVERDLYILLYSLYKEVKYDNFISLLTILAFLNRGGEK

SEQ ID NO: 136 - DNA, 2721 bp, Thermoanaerobacter mathranii
atgagtaagaaagaagagttatttgaaaataaattgaaagcatattttcatgattctccagataagccatttattttgttaacaggtgaaaaccatgagaaaagagctaaggaaatatctaaaaaaatagatattccttaccacaaaactattgcttcagatgttttagcttcatctatggaaagatattatatacctaaagatgccagtaaaaataaaaatttacaagttgtttttgaagaacaacctgagtttgttcatcctcttgcagctaatcgatataataattttgttatagaaaaagaagtgtttaaaaaggctgtagatgaagcagtagatgagttatcaaaactagactttaaagatagttataaaaaatttgtgtatttatggcgttatttgaaagagcttttaaaaaaacatacgccaagtgaatatagaaaatattgggatttagctcctgctgatactcgatttcctaatcacacaatatttcagcatttaaaattggcatctgcggtgaatgcatatttttataatgaattgaatttaaacaatatgacactatttatttttacaataggtcctgttcaagaatatatcgtgcaggcaaggaagacacaagacttgtattggggaagttatattttgtcttatttaacgtgggtggcaatagaaaaagttatagaagcttatggaccagattctataatattccctgaacttaaagaacagcctttgtgcgatttttggatagcaaagctatttaataacagtgcaactacgactaaagaccttaaaactcctactcttcccaacagattttttgcaattttaccaacaaaaaatgtagaagaaattaggttactaaatcttaaaaaaacagtaaaagatgaatatataaaaatcggggaatatgtttttagtcatcttgtaaaaagcaatgatgagcaaaaaaaattgcttttacgccaattatcaaactttccagatgtgtattgggtggcgttgcctttagaaaatggggatgtaaacaggcctgattgggaaatccaattggataagataaaggattattttaacagtgatgaggtggaagagataaaggatttattgagatatattaaagataaaggtgaatacgggcctaacattggtaatatttatgggttactttattcttttatggagaaaatgatggggacaagaaaaggcataagaaacttcaatcaatatgaagaaatagggcgaaaatgttctatatgcggtgagcacaatgttattatctacaggtgtacgagagaagaagatgaaaagatagaaaaagggaaagaaagttataagattaaacttcttagagaacaaaatgcaataatcaaaaaaagtgatgataaaagtattacttataagtatttagcacaaggagaagggttgtgcagcagatgcctgacaaaaagggcggcagaaatatattttaaagatatgtttgggaaaaacaacatagaagaaagttttccctctactgcagagatagcattactagatataattaacaattcagataatgacctaaaaacaaatataaaaagatacaaagaagtattcaaaaagtggtgcggtgataactttgattatgaattgttgtatgaggaaaatctcaatgaaaattattttaaaacttatgattttaaatcaaaaagattaggcgaacttaaagaattattaaagagtattgataaaagaattaaagacataagactgaataaaaagaaatattatgccgttataaagcttgatggcgataacatggggaaatggttagcaggagaattggcaccctatatgttagaaatgtaccacagtaaattgcagggttttttaccagaagattttaaagaaaaaatcaaggataaaaagcgactaatgacaccagctgttcactctttaattagtgaggcacttaagaactattctttgaaatatgtaaaagaaatagtggaagagacaagagcaggaaaagtaatatattctggcggagatgatgtatttgcaatagtaaatcttaattatttattagatgttatggtaaaacttagggcggctttcagtgggcacttaattgttaataataagataattccagattttacaatagatgccggatttgtggaacgaaaagaggaaattgatgtgatgatgggaaacaaagccacggcgtcaatgggggtagttatagctcattataaagaagatttaaaaaatgttatagcttctgtagatgaggtagaggaagaatatgcaaaaaaagtagaaggaaaggatgcctttgcaataaaacttattttgcattctggtgagaattacattgccagagccaagtggaattatgatgatgcaagaaataaagaaggaacaataggtttattaaaagatataaattccttttttaaagaagacaaattaagtatttcttttgttggaaaattaaaagcagctttggaaaggctagatgtagattctcttccacaaggcatttttattagtgagctcaaaagaaatattaaacgttcattgaatgagaacttaagtaaagatgaaaaagaaaaagttgaaagagatttatacattttactatattctctgtataaagaggtaaaatacgacaattttattagcctcttaacgatattagcttttttgaatcgaggaggtgagaaataa

SEQ ID NO: 137 - protein, 906 aa, Thermoanaerobacter mathranii
MSKKEELFENKLKAYFHDSPDKPFILLTGENHEKRAKEISKKIDIPYHKTIASDVLASSMERYYIPKDASKNKNLQVVFEEQPEFVHPLAANRYNNFVIEKEVFKKAVDEAVDELSKLDFKDSYKKFVYLWRYLKELLKKHTPSEYRKYWDLAPADTRFPNHTIFQHLKLASAVNAYFYNELNLNNMTLFIFTIGPVQEYIVQARKTQDLYWGSYILSYLTWVAIEKVIEAYGPDSIIFPELKEQPLCDFWIAKLFNNSATTTKDLKTPTLPNRFFAILPTKNVEEIRLLNLKKTVKDEYIKIGEYVFSHLVKSNDEQKKLLLRQLSNFPDVYWVALPLENGDVNRPDWEIQLDKIKDYFNSDEVEEIKDLLRYIKDKGEYGPNIGNIYGLLYSFMEKMMGTRKGIRNFNQYEEIGRKCSICGEHNVIIYRCTREEDEKIEKGKESYKIKLLREQNAIIKKSDDKSITYKYLAQGEGLCSRCLTKRAAEIYFKDMFGKNNIEESFPSTAEIALLDIINNSDNDLKTNIKRYKEVFKKWCGDNFDYELLYEENLNENYFKTYDFKSKRLGELKELLKSIDKRIKDIRLNKKKYYAVIKLDGDNMGKWLAGELAPYMLEMYHSKLQGFLPEDFKEKIKDKKRLMTPAVHSLISEALKNYSLKYVKEIVEETRAGKVIYSGGDDVFAIVNLNYLLDVMVKLRAAFSGHLIVNNKIIPDFTIDAGFVERKEEIDVMMGNKATASMGVVIAHYKEDLKNVIASVDEVEEEYAKKVEGKDAFAIKLILHSGENYIARAKWNYDDARNKEGTIGLLKDINSFFKEDKLSISFVGKLKAALERLDVDSLPQGIFISELKRNIKRSLNENLSKDEKEKVERDLYILLYSLYKEVKYDNFISLLTILAFLNRGGEK

SEQ ID NO: 138 - DNA, 2730 bp, Thermoanaerobacter tengcongensis
ttattcattacaggaatgctccattgcaattgaccttgctataatcaacatattagcaaaatctatcactctatctggcgtttctttaactatctcatcaaactttgggagcaatatctcactagcatatttttctaaaatatctctgtttccactctgacgaagaaatattctctttaattcatttctcaaaatcccaataatttgttctttattttcgtcatcatacaatctgtctactacctcaaaaaattgatagggaaaagtggatgaaaattctcctttcttgaaatgctctatgagttctctcaaaaaatccatcaacgcccatttgcccccgcattcttttagtgctccacttccttttataaacttaaggcaaaaagcatttctattatactgtctttcgtcttttgctttcttctgagccaattgaacctctttcaaggcaaggtaaagaggatatttgtgatgaactattacaatgcctgcactcatggaggcttcagaacttaaaacttctttaaaagcgttctgcaattcataagcacattccaacacctcttctacaggaagtaatgctagaacgtcatctcctcctgcataaaccaatttcccgtaatgtgtttcttctacaattcttcgcacttcttgaagagcaaacgtggaaattttcctactcaaggtctggtgaagagaaggagtagtagggtgtttcttacaaagtatcgaagataggttatcttttgcatgttgttttatatgttctcccactttggggtgtaaagtttccattataggtggattattctctccttttaaccacttccccatgtggtccccatccatttgaagaatagcataatatctggaagggttgaccctgtgtttttctaaaagctttgttattttctgagacatcttctgaaattcctctactttgaagttctctgtatgctcacttttaatatattcttctctataactctccctcatcaaccactgtccatctatttcaaaaagttggttatcttttaatttcggaacagaaacagtattgggaagcaaaagcttctgtttaaattctccaaataattccttgaactctgcaataaactctttgttgtcagcaattctccttttttctccaatagttgccatttcagaagttgagggaaatttcatttcttcggaaagatttagctcttccttcattacctttgggaataatcgctttgcaagacacactccacagagttgctctttttcttttaccaagcctttttccttactcctcaatttttcccaatctaatggcaaaacttcaaactctccacataaactgcacttacgccctttttgttctaactgttcaaattcccttatgctcttcctcgctccaagcaatttttcagttagctcaagaagtaatgaataggctatgctaaaatctctgtattcctcatctttttctttatttttactccatatcttaggaacagattctataaactcacttatcgttttgtaaagctctgtctctcctattatttctttgtaatcatccaaaacctcttttggagactctttctcttcaaaccatggcataaccgcccagtaaacctggaaataatttaatagctgattttcaatctgcaattgaattttctctaaatccccctctagatttaaaatactttctaatcttttcactgtcttttttgctaggctctttagttgttctttaaagtttttctcgcactcttcgcccagttttaaagcttcaccttcattaattggcgcaattgcaagaaatctgttgggcatattggcaatagtcaacttttcttccaaacccttagaccttggaatgttattccactctttaaaccattcatcaaattccttttgtgataaatgagtaagcgaattaccaaatacctccgaactaagccataaatctacaagaggttgacctaaaagatttgggtacacaatcacatctgccccataacgttcaactacaaacttcatgattttccatataaagtaagaaagcatataacttccagcccataaatcagaagtttttctcgccgtagcaataaagctctgaacagggccaattgtaaagagcaaaaatgctggtttgggaagtgctgaaaccagagtagaagtttggacaaggtgatcatagatggagtgattgggcgcccttgtatctgcaggatggattctcatccagtgaaaaatttcttggtagaatctccatagaaataaaagcaagattttggctttttcttttttttcttcttcctttatcctagaaaggttataattctttgcaagcttctctactaattctaaaaaacgcttattctcagtttcataatctgtttctgccagtatatcgtaatatatttttttattaaacatgtcaaaaaatatcacatcttctcctcttattttaacagccactgggggaagtattctatttacaggataagcttgtgtatctgctttttcaataagtttctcttcttcctctgttaaatcttctccaagaagtggttcaattactttagatttaattaaaatctcatggcatcgacctttttcctgaagctggaacttttttatacattcttcattgtccatagaaattatccaatgcttatgaggagggtcatgaagaaaagctttaagtttcagaagccatactttttccat

SEQ ID NO: 139 - protein, 909 aa, Thermoanaerobacter tengcongensis
MEKVWLLKLKAFLHDPPHKHWIISMDNEECIKKFQLQEKGRCHEILIKSKVIEPLLGEDLTEEEEKLIEKADTQAYPVNRILPPVAVKIRGEDVIFFDMFNKKIYYDILAETDYETENKRFLELVEKLAKNYNLSRIKEEEKKEKAKILLLFLWRFYQEIFHWMRIHPADTRAPNHSIYDHLVQTSTLVSALPKPAFLLFTIGPVQSFIATARKTSDLWAGSYMLSYFIWKIMKFVVERYGADVIVYPNLLGQPLVDLWLSSEVFGNSLTHLSQKEFDEWFKEWNNIPRSKGLEEKLTIANMPNRFLAIAPINEGEALKLGEECEKNFKEQLKSLAKKTVKRLESILNLEGDLEKIQLQIENQLLNYFQVYWAVMPWFEEKESPKEVLDDYKEIIGETELYKTISEFIESVPKIWSKNKEKDEEYRDFSIAYSLLLELTEKLLGARKSIREFEQLEQKGRKCSLCGEFEVLPLDWEKLRSKEKGLVKEKEQLCGVCLAKRLFPKVMKEELNLSEEMKFPSTSEMATIGEKRRIADNKEFIAEFKELFGEFKQKLLLPNTVSVPKLKDNQLFEIDGQWLMRESYREEYIKSEHTENFKVEEFQKMSQKITKLLEKHRVNPSRYYAILQMDGDHMGKWLKGENNPPIMETLHPKVGEHIKQHAKDNLSSILCKKHPTTPSLHQTLSRKISTFALQEVRRIVEETHYGKLVYAGGDDVLALLPVEEVLECAYELQNAFKEVLSSEASMSAGIVIVHHKYPLYLALKEVQLAQKKAKDERQYNRNAFCLKFIKGSGALKECGGKWALMDFLRELIEHFKKGEFSSTFPYQFFEVVDRLYDDENKEQIIGILRNELKRIFLRQSGNRDILEKYASEILLPKFDEIVKETPDRVIDFANMLIIARSIAMEHSCNE

SEQ ID NO: 140 - DNA, 2724 bp, Carboxydibrachium pacificum
tcatatcctcgcctccattgcaattgaccttgctataatcaacatattagcaaaatctatcactctatctggcgtttctttaactatctcatcaaactttgggagcaatatctcactagcatatttttctaaaatatctctgtttccactctgacgaagaaatattctctttaattcatttctcaaaatcccaataacttgttctttattttcgtcatcatacaatctgtctactacctcaaaaaattgatagggaaaagtggatgaaaattctcctttcttgaaatgctctatgagtcctctcaaaaaatccatcaacgcccatttgcccccgcattcttttagtgctccacttccttttataaacttaaggcaaaaagcatttctattatactgtctttcgtcttttgctttcttctgagccaattgaacctctttcaaggcaaggtaaagaggatatttgtgatgaactattacaatgcctgcactcatggaggcttcagaacttaaaacttctttaaaagcgttctgcaattcataagcacattccaacacctcttctacaggaagtaatgctagaacgtcatctcctcctgcataaaccaatttcccgtaatgtgtttcttctacaattctttgcacttcttgaagagcaaacgtggaaattttcctactcaaggtctggtgaagagaaggagtagtagggtgtttcttacaaagtatagaagataggttatcttttgcatgttgctttatatgttctcccactttggggtgtaaagtttccattataggtggattattctctccttttaaccacttccccatgtggtccccatccatttgaagaatagcataatatctggaagggttgaccctgtgtttttctaaaagctttgttattttctgagacatcttctgaaattcctctactttgaagttttctgtatgctcacttttaatgtattcttctctataactctccctcatcaaccactgtccatctatttcaaaaagttggttatcttttaatttcggaacagaaacagtattgggaagcaaaagcttctgtttaaattctccaaataatttcttgaactctgcaataaactctttgttgtcagcaattctccttttttctccaatagttgccatttcagaagttgagggaaatttcatttcttcggaaaggcttagctcttccttcattaccttagggaataatcgctttgcaagacacactccacagagttgctctttttcttttaccaagcctttttccttactcctcaatttttcccaatctaatggcaaaacttcaaattctccacataaactgcacttacgccctttttgttctaagtgttcaaattccctcatgctcttcctcgctccaagcaatttttcagttagctcaagaagtaatgaataggctatgctaaaatctctgtattcctcatctttttctttatttttactccatatcttaggaacagattctataaactcacttatcgttttgtaaagctctgtctctcctattatttctttgtaatcatccaaaacttcttttggagactctttcttttcaaaccatggcataaccacccagtaaacctggaaataatttaatagctgattttcaatctgcaattgaattttctctaaatccccctctagatttaaaatactttctaatcttttcactgtcttttttgctaggctctttagttgttctttaaagtttttctcgcacttttcgcccagttttaaagcttcaccttcattaattggcacaattgcaagaaatctgttgggcatattggcaatactcaacttttcttccaaacccttagaccttggaatgttattccactctttaaaccattcatcaaattccttttgtgataaatgagtaagcaaattaccaaatacctccgaactaagccataaatctacaagaggttgacctaaaagatttgggtacacaatcacatctgccccataacgttcaactacaaacttcatgattttccatataaagtaagaaagcatataacttccagcccataaatcagaagtttttctcgccgtagcaataaagctctgaacagggccaattgtaaagagcaaaaatgctggtttgggaagtgctgaaaccagagtagaagtttggacaaggtgatcatagatggagtgattgggcgcccttgtatctgcaggatggattctcatccagtgaaaaatttcttggtagaatctccatagaaataaaagcaagattttggctttttcttttttttcttcttcttttatcctagaaaggttataattctttgcaagcttctctactaattctaaaaaacgcttattctcagtttcataatctgttgctgccagtatatcgtaatatatttttttattaaacatgtcaaaaaatatcacatcttctcctcttattttaacagccactgggggaagtattctatttacaggataagcttgtgtatctgcttttttaataagtttctcttcttcctctgttaaatcttctccaaaaagtggttcaattactttagatttaattaaaatctcatggcatcgacctttttcgtgaagctggaacttttttatacattcttcattgtccatagaaattatccaatgcttatgaggagggtcatgaagaaaagctttaagtttcagaagccatactttttccat

SEQ ID NO: 141 - protein, 907 aa, Carboxydibrachium pacificum
MEKVWLLKLKAFLHDPPHKHWIISMDNEECIKKFQLHEKGRCHEILIKSKVIEPLFGEDLTEEEEKLIKKADTQAYPVNRILPPVAVKIRGEDVIFFDMFNKKIYYDILAATDYETENKRFLELVEKLAKNYNLSRIKEEEKKEKAKILLLFLWRFYQEIFHWMRIHPADTRAPNHSIYDHLVQTSTLVSALPKPAFLLFTIGPVQSFIATARKTSDLWAGSYMLSYFIWKIMKFVVERYGADVIVYPNLLGQPLVDLWLSSEVFGNLLTHLSQKEFDEWFKEWNNIPRSKGLEEKLSIANMPNRFLAIVPINEGEALKLGEKCEKNFKEQLKSLAKKTVKRLESILNLEGDLEKIQLQIENQLLNYFQVYWVVMPWFEKKESPKEVLDDYKEIIGETELYKTISEFIESVPKIWSKNKEKDEEYRDFSIAYSLLLELTEKLLGARKSMREFEHLEQKGRKCSLCGEFEVLPLDWEKLRSKEKGLVKEKEQLCGVCLAKRLFPKVMKEELSLSEEMKFPSTSEMATIGEKRRIADNKEFIAEFKKLFGEFKQKLLLPNTVSVPKLKDNQLFEIDGQWLMRESYREEYIKSEHTENFKVEEFQKMSQKITKLLEKHRVNPSRYYAILQMDGDHMGKWLKGENNPPIMETLHPKVGEHIKQHAKDNLSSILCKKHPTTPSLHQTLSRKISTFALQEVQRIVEETHYGKLVYAGGDDVLALLPVEEVLECAYELQNAFKEVLSSEASMSAGIVIVHHKYPLYLALKEVQLAQKKAKDERQYNRNAFCLKFIKGSGALKECGGKWALMDFLRGLIEHFKKGEFSSTFPYQFFEVVDRLYDDENKEQVIGILRNELKRIFLRQSGNRDILEKYASEILLPKFDEIVKETPDRVIDFANMLIIARSIAMEARI

SEQ ID NO: 142 - DNA, 3759 bp, Sorangium cellulosum
atgagcgagcgggatcgagaccgagatcgaaacctcgctgtcgctcatcccgtccacggcaggaccggagatgacgagatcgagcaccatgggacggaggcggatcggacccgcttctggcagcaaaagctccttcagctcctgcacgatcccccgggaaaggcgttcttcctccgacagggcgcgggcggacacaaggcggtcgcggcggatctgttccaggcgacggcgggcgttccgctcaagtatgtacggcccggaccggactgggcggcttcgggcgcggaccggccggtcagctccccgccacgtccagcgcacgtctcggtggactgggtgaagaacccgatcctgacgcaccccctcgcctccgggaccgccgccatcgacctcggccgccgggacctgccagcgtcgcgcgagcaggtgcgagcgctcgccggggacgtcggccgcacgctccgcgagctcctcgagcggcgggtgtcccaggaggacgagctcgacgacctccccgaagaagaggagcgcgagcgcttcctgagcgagcgcgccgagcaggtggaaagcgagctcgccgcactgccccgctggcacgacgacgcgcggctccagcaggcgtgcttgcagctctggcgccgcttgcccgaagagccgccgcccggcgtggccgaggtggtctggcggcaccagcccgcagactcgagggccccggatcacagcctctgggatcacctgcgcgtcacctcgtcgctctcgttcctgagcgggaggaggcgcgaggggcccgtcatgccatggctcctcgccttcagcctcggcccggtgcagcggttcatcgcgcagtcgcggacatccaccgatctctggacgtcatccatgctgctgtcggatctcgtgtggcacgccatggtgccgttcgtcgagcggtacggtccggaggcgatcgtgtaccccgatctgcgggccaacccgcgcgctgacgtgtggctctgggagcaggcgaacggggcggacggagccgcgccgccggcgcacgcggcgcggtaccaggacgtcctgcccgagcagctcaatccgtgctcctacgccgggatcttccccaacacgttcatcgcgctggtcccgctcggcggcgagcgctacctgacgctgctcaaggatctcgcgggcgaggcgcgccgcgccgtcctcggccgctggagacagctcgcggacctcgccaggcgctacttcctggagcaggccgcgaagcgccccgaggccatgagcgactccgagcggaaggccttcgaggccacgtgggcccgccagcacgaggacgtgctcttcacgtcctggtccgcggcggcgtggccgagcatcgagcgcgtcaacgacccggagtcgctggccatccgtgaggcgctcgtcgcgcagcgccccgcccaggcgctcccacgcgaggacgcggaggcgctcgcggcgtggcgcgagcgccacacgacatggatcccgggcgagacgttcgcgcgctacgcggaggcccgttatgtctacgcgcggacgaaccgcaccgtgcaccagtgcgagcgcgggttcgactatccgctcctccatcatgcgctggtgtcgcgccacgggctgcgaaaggcagaggcgcagggcgcggcgatcgcggaggagtccggagagaagtgcacgctctgcgggctgcgccaggccctcggcgccggggacgcgggggcgagcgtggacgcgcagcgcgagacagcgcgcgcgttctggcgccgcttcgaccgcaacagcgacgacggggcggagcgcctctgcgccgtgtgcacgatgaagcgcgtcctcgttcgcgccggcgtcgccacggacgagcgcggcgctcgtcgccgggtgggcctcaccgccgcgtgggcggggccggcgacgccgctcgacgacgtgtgtgatcgcgatgagctgcgggtgccgttcccgtcgacggcgacgatcgctgcccagggctacctgtgcgccgtggccacccgccgggagctgcaggcgcaggtcgccgaggtggtgcggtgttgcgaggacgcgaggctgccgcgcacgagcttcgtgcggtcgctgcgatcgctggccgaggcggcgcagcgcgcggacggcgcggggctgcgcttcctcgagtacgaggcggagctcacggtcttccccgaggtgctcgcggcggccgaggagcgcgccccggagggcggcggccgagagcaaggcgacggcgccgcgcagcgcggcgggctgcgcgatcgcgacggcaagcgcgtcccccggtcgaaggtcgaggccctgcgccgcgccgtggagagcctgcgccgggcagcgaaggagctcgatcgaccggccgggtcggcgcggcgcgccggggaccgcattcccgcgccgggcagccaggtcgcgctgatcgcgctggacggcgaccggatcagccagatcctcctgggcgagaagatcggcgctcgctggcgcgacgtgatccatcccgaggccgtcgcgacgatggagagcaacgaggtcacccgcgcggcccgctggccggagctcctcggtcgcaagcgcctcatggggccatcgacgcacgccttcgtcaaccgcgtgctggccgagttcgcgcacaccatcgtcccctgggtggtggagcgggagttcagcgggaggctcatctacgcgggcggagacgacgtgctcgccatcgccccggcgggcgaggcgctcgacctctgcgcgcggctcgcgcagctctacagcgccgcgtgggtcctcgacacgtcacccggcgaagggccgtgggcgtggcgcgcgaagacctggacgagctccacgtccatccgggccagcgagcgcttcgtcgttgtcgcgccgagcgagaccggagagccgctcccctggccgatccccgaggcgtcgaggcgcgggccgatccctgccggggacgccgcagcggcgagcgccgccgagagcgccgaggagcgcctgctcccgatgatgggcgcgggccagacgctctccgccgggatcgcgatcggccactacaagacctctctcggcggcctggtgaaggccgcctgggacgagcgcgatcgggtgaaaggcgaggacgaggagcgcgattgcgcgaaggaggacaacgaggagcgcatccgggtgaagggcgatgacgaggagcgcgacagggcgacgagggaggacctcgccgtcaagaacgccttctcgatccggcggtacacgcgcgggggcgagaaggcgcggctgcgcctctcctggggacggcgttgcgccgcccccgggaaggcgctcgcaggctacctgcgggtgaaggccgtcatcgagggtttcaagaccggcgcgctccccggaaggcttccgtacaagctgcgcgaggtcgagggagccgtgctcgccgcgtggctcgtcgaggcgaaggcgctgcccggcggcctgacgagccgcgaggcccggcgcgagctcgtgaagcgggtcgagccctttgccaggggcctgttcggggcgcagtgcgcggcggaggtggagggagctttcgagatctggtggcaagggctcctgagcgcgcttcgcgcgcacgagcgacgatggagggcgccggacgcggtgccccctggcgcgacccccgtcgacgacggcgcgccgtcgcgcgggctcggctcggagcaggggctggcggtgtgtcgcttcctgggagcgctcgcccgcggggaggaggacgcgcaatga

SEQ ID NO: 143 - protein, 1252 aa, Sorangium cellulosum
MSERDRDRDRNLAVAHPVHGRTGDDEIEHHGTEADRTRFWQQKLLQLLHDPPGKAFFLRQGAGGHKAVAADLFQATAGVPLKYVRPGPDWAASGADRPVSSPPRPAHVSVDWVKNPILTHPLASGTAAIDLGRRDLPASREQVRALAGDVGRTLRELLERRVSQEDELDDLPEEEERERFLSERAEQVESELAALPRWHDDARLQQACLQLWRRLPEEPPPGVAEVVWRHQPADSRAPDHSLWDHLRVTSSLSFLSGRRREGPVMPWLLAFSLGPVQRFIAQSRTSTDLWTSSMLLSDLVWHAMVPFVERYGPEAIVYPDLRANPRADVWLWEQANGADGAAPPAHAARYQDVLPEQLNPCSYAGIFPNTFIALVPLGGERYLTLLKDLAGEARRAVLGRWRQLADLARRYFLEQAAKRPEAMSDSERKAFEATWARQHEDVLFTSWSAAAWPSIERVNDPESLAIREALVAQRPAQALPREDAEALAAWRERHTTWIPGETFARYAEARYVYARTNRTVHQCERGFDYPLLHHALVSRHGLRKAEAQGAAIAEESGEKCTLCGLRQALGAGDAGASVDAQRETARAFWRRFDRNSDDGAERLCAVCTMKRVLVRAGVATDERGARRRVGLTAAWAGPATPLDDVCDRDELRVPFPSTATIAAQGYLCAVATRRELQAQVAEVVRCCEDARLPRTSFVRSLRSLAEAAQRADGAGLRFLEYEAELTVFPEVLAAAEERAPEGGGREQGDGAAQRGGLRDRDGKRVPRSKVEALRRAVESLRRAAKELDRPAGSARRAGDRIPAPGSQVALIALDGDRISQILLGEKIGARWRDVIHPEAVATMESNEVTRAARWPELLGRKRLMGPSTHAFVNRVLAEFAHTIVPWVVEREFSGRLIYAGGDDVLAIAPAGEALDLCARLAQLYSAAWVLDTSPGEGPWAWRAKTWTSSTSIRASERFVVVAPSETGEPLPWPIPEASRRGPIPAGDAAAASAAESAEERLLPMMGAGQTLSAGIAIGHYKTSLGGLVKAAWDERDRVKGEDEERDCAKEDNEERIRVKGDDEERDRATREDLAVKNAFSIRRYTRGGEKARLRLSWGRRCAAPGKALAGYLRVKAVIEGFKTGALPGRLPYKLREVEGAVLAAWLVEAKALPGGLTSREARRELVKRVEPFARGLFGAQCAAEVEGAFEIWWQGLLSALRAHERRWRAPDAVPPGATPVDDGAPSRGLGSEQGLAVCRFLGALARGEEDAQ

SEQ ID NO: 144 - DNA, 2181 bp, Thermoanaerobacterium thermosaccharolyticum
ctattctccctcctttccgataaaagcagatatttcgattagttttaagaaattgtcaatatcatcatcatatttgtgatataaatttttaagtacatcggagatttctttagaaatattctttttttcttctttcccgatatttccactaacagtatcgacggctcttaaaacaactctttttatctccgtattaataatacccgtttcggcaatataatttccgcatttatctttaagtttcgcaaattcttctgctagagtataaactattcttctagaaattcgcaccccactttgattccttctaaagaggtacgataattctttcaatatctccagaacatccatatcaccgtatttccacttgcttactattattttttcttctcctgaacgcttcaataatgaaatagcaaaactatccttctcagtattgcttttggcttttttttctgtttctcttactttatccataaccatttttaacggcgttttataatgagcaatcactaccccacaagacgcagttgcgttcttgcccattgttaaaagtaattttccatctttttcaacaaaacctgtgttattactccaatctactttgatttcattattttctatctttatatgtcctgaaaaggctgctcttaatcttctcatcacttcaaatagatcttttaaattaacgaaagcaagcacatcgtctccacctgaataaattagtttacctaaatgatcatcttcaactattttctttacgaactcaagactataatttctcaaagatagtgaaattaaagagtggatcgtaggagcaagaagtttattctttatagatgtttttaactcttctttcactttattaggtaatttattccataaatcagaaccatatatatgctcaaagttgtgtaacaatttacctgcaagccattctcccatattatctccatcaaataaaacaacggcgtagtaaggattaggctcccctactttgtctgtaatttgtttaagtgattttctcaaatcctctatttctttatcatctatttcaataccaaactgctttttgatattttctgtacataaattttcctcaaaaaaccattctccctcgatatttacaacattattaaaatcaccttcaattttgttcaaaggcttaacttgtatttgtcttagcacattttctccaactatttttttaatatcatcaatatatgcattaaactgtacttctgcatctttcaaagctctctttttaaaattagatgaagccatttctgcagtagatggaaaagtatagtctataaatttaccatcaaccttatcacctaaatatttatccaaagctcttttaacaaaacaaggtatacaaagtgcctctttttcacttatgtatttacctacttgtaaactccccattcctgcctttattactccctcttttgtaccgcatatattacatttcttcccatattcattgatttggctaaaattcctcaaattttttcttatacccatagacttttcaagggcagaatagccaaggtgatagattaaaccaacgttttctttttggacttcctcaaagaaatctttaaagtcctcttcagtaatatatcttccatcttttttaaaaggcatagctacccagtaaatttcaggaaaatctagtgtctgtttttttattactgcattacaatcctcatctttcttatctaacctaattttatctattaatttaaacttatttaaaactatatcaaccatctctttccatttttttctaacaatatcctccattttatgtgccaattttattattttactttcttcactttctggtatcaaagccacaaatctattaggaatcgtaggctgatcaataaatgacgaaatagaagatttcctgtttatattacatcttttcaaatgccattccattaaaggctgagcagaaagattaggataaattatgcttttaggaccatacctatcaattacttcttccataccaataaaagttaaatatgaaagcaaaaaacttcccataaataaatcctgggtctttctcgcttgagaaataaattgctgtactggccctatagtaaagagaaaaagagaaacgttgctgctattctcagcgaaactctcgtatattttctcctccatcat

SEQ ID NO: 145 - protein, 726 aa, Thermoanaerobacterium thermosaccharolyticum
MMEEKIYESFAENSSNVSLFLFTIGPVQQFISQARKTQDLFMGSFLLSYLTFIGMEEVIDRYGPKSIIYPNLSAQPLMEWHLKRCNINRKSSISSFIDQPTIPNRFVALIPESEESKIIKLAHKMEDIVRKKWKEMVDIVLNKFKLIDKIRLDKKDEDCNAVIKKQTLDFPEIYWVAMPFKKDGRYITEEDFKDFFEEVQKENVGLIYHLGYSALEKSMGIRKNLRNFSQINEYGKKCNICGTKEGVIKAGMGSLQVGKYISEKEALCIPCFVKRALDKYLGDKVDGKFIDYTFPSTAEMASSNFKKRALKDAEVQFNAYIDDIKKIVGENVLRQIQVKPLNKIEGDFNNVVNIEGEWFFEENLCTENIKKQFGIEIDDKEIEDLRKSLKQITDKVGEPNPYYAVVLFDGDNMGEWLAGKLLHNFEHIYGSDLWNKLPNKVKEELKTSIKNKLLAPTIHSLISLSLRNYSLEFVKKIVEDDHLGKLIYSGGDDVLAFVNLKDLFEVMRRLRAAFSGHIKIENNEIKVDWSNNTGFVEKDGKLLLTMGKNATASCGVVIAHYKTPLKMVMDKVRETEKKAKSNTEKDSFAISLLKRSGEEKIIVSKWKYGDMDVLEILKELSYLFRRNQSGVRISRRIVYTLAEEFAKLKDKCGNYIAETGIINTEIKRVVLRAVDTVSGNIGKEEKKNISKEISDVLKNLYHKYDDDIDNFLKLIEISAFIGKEGE

SEQ ID NO: 146 - DNA, 2874 bp, Nitrococcus mobilis
tcatgtgtccaagctccgtgtctcccgagccaggaattcggctaccgacagcatgttctcgatgaaatcggcggccttggccgggttctcgacggggcacagcttggccagccgttcggcatggatcggagcgccttctttctccaacttctggcgctggaattggtaatgcagcatttgcccgagcaggcgacggaacggcgcctctccgcctaccgctacgggcttcggtagatcccgcagccagccgcggacgttgtaggcggcccggcgcgaggcgccggcgtttttttgcagcgcggccgagagggtgcggagtgctccgatcacgtcctcgccgcccatctgccagggcagagtgagctcgagggcgccgccggcgcgcttgatgatggtgagtgagaaggcatctcggctgccgcgattatatgccttggccgttttctcggccccccgcagcgcccgcagaaccgcgcccagcggggcctggtgatgggcgataacggcgcccatggaggcagtggcgttttcgcccatggtcagatacagccgtccgcggcgccgcgcgaaaccgttttgaaagcgcatttcgtgagccgcctcgccctcctccggcgccagaccggagtaggcaagacgcaggcggcgcatggcggagagcagatcggagacggcgaacatggccatgaggtcgtcgccgccggcgtagagcacccgcccgatgtgctcgcgctccaccacttcgcgggcgatcaccgtagagaaatcgttcaaggcgccggagatcgccaaatggcggccgggtgagacggcgcgttgcgcgtttagataatcatccagcggggagttgtcctggaagcgcgcttgcaacccggcctgtatttttggatgaaaggcggcgcggtacgggatggtgaagcgctcatcgccggagagccaggcccccatatagtccccgtccatgagcagcagcgcgtaataggtctcgggtttgtagccgagcgcgtgggccagccggctaatggcagcctccgccttgccctcgtcacgctgtgcctcgatccaggccgggatgcgttctatgagctctcgattcgggtgctcgcgcagcttgtcggccaagcgccggggcagggccacacgctcgccgcgttgctcgatttcattgcgcaactcggtgtcgatcgccagtggtgcgtcgcccagtttgtccaaggtagtggccagcgccatggtgtgggtcgagaccacgaaccgcgagaatgacatattgagcgtgtccttgagctcttcgcagaacagcgtcggccacaggcgcttgagcgtggcgagcgcgcccagatgctcgcctttgcgcacccaggtcggccgcttacggccgagccggctccagagagtgtccgcttgatcgcgttggcccggtggtaggctcagatgtgcggggttgtcagtgagccattccgcctcggcggtgagcgagcagcggtagccgtgctgctccagggcgtcgaaagcgcgcacggacttggcggcgacgagcacccgatctacgagatcgtagaccgccgggtacagcacgccgggattgggttggtaaaaggtggccgcgccatcgagctccagcggccggcttagcacccgccaggcgcggctgccgagaaagccgggctctatcgggtcgcccggatagaatgggcgtagcgcctcggcaagcgcgccagtgcggaccttgcgctcaccgtcggcggtcagcgcgctgtagggcaccgccgcccagtgcacctcggggaagccttggagttgctcgcggagttggcgatgagcatgcaggtcgcggcgatcctcgacgccggcctcttgcagcacccgctgcagggcagcctcggtgcgccccacggtccactggcgcagttgttcggtgatgtcttgggcgatggcctcggccgcgctcgcgggcaccagggccaggaaacggttcggcagcgcggcgctgaacagcgggttgccgtcggtagggtcacgcatccaattctgtgcgccaaagaggttgcggtcgagcccgcaatcgcgcaacagccacagatccacctgcgggatgccgcgcagccggggaaataggatggcctccggcccgaggcgctcacagaccacgcgcatggcttcccaggacagccgtgcgagcagatgcgaaccggcccacagatccgaggtggtgcgggccgcggcgatgaactcctgcaccgggccgatgcttatattaagcagggcgcactcgccgtttgcatccgccacgaaggcaccggcgaaggcggagaccagatcgaggtgatcccagatgctatggtcggggatgcgggtatcggccggtaggaagcgccacagctcgccaagccgcgcggtatcatccgcggtgtcgagctccgggccgaagcgccacaatgtgagtgccatccggcgcggatcatcaccgccggcggctttcagcaagcgcttgaaatgggcctgactttggtccttgacggcttcgatcctggtttcgcgcaacccgccctgttggcgcaagtcgaaggccttgccggtcaacgggtgtatgggcaccggctgctcggcgaagttgacctggctccagcgggcatagggtccttctttgccgtcacggggaaactgcggtcggtcggcggcggaggcccaccagtccgccttgcgcacagtcgcgcgtaaatccccggccatgccctgcggaaacaggcgctcgtgcagcacgcggctggtgccgccctcgggaccggcggggtcgcgcagcagcaccagcgctttctcggccggatcgtgcagacgcgcgtgcaacttggcttgccagagtcggtcggtcat

SEQ ID NO: 147 - protein, 957 aa, Nitrococcus mobilis
MTDRLWQAKLHARLHDPAEKALVLLRDPAGPEGGTSRVLHERLFPQGMAGDLRATVRKADWWASAADRPQFPRDGKEGPYARWSQVNFAEQPVPIHPLTGKAFDLRQQGGLRETRIEAVKDQSQAHFKRLLKAAGGDDPRRMALTLWRFGPELDTADDTARLGELWRFLPADTRIPDHSIWDHLDLVSAFAGAFVADANGECALLNISIGPVQEFIAAARTTSDLWAGSHLLARLSWEAMRVVCERLGPEAILFPRLRGIPQVDLWLLRDCGLDRNLFGAQNWMRDPTDGNPLFSAALPNRFLALVPASAAEAIAQDITEQLRQWTVGRTEAALQRVLQEAGVEDRRDLHAHRQLREQLQGFPEVHWAAVPYSALTADGERKVRTGALAEALRPFYPGDPIEPGFLGSRAWRVLSRPLELDGAATFYQPNPGVLYPAVYDLVDRVLVAAKSVRAFDALEQHGYRCSLTAEAEWLTDNPAHLSLPPGQRDQADTLWSRLGRKRPTWVRKGEHLGALATLKRLWPTLFCEELKDTLNMSFSRFVVSTHTMALATTLDKLGDAPLAIDTELRNEIEQRGERVALPRRLADKLREHPNRELIERIPAWIEAQRDEGKAEAAISRLAHALGYKPETYYALLLMDGDYMGAWLSGDERFTIPYRAAFHPKIQAGLQARFQDNSPLDDYLNAQRAVSPGRHLAISGALNDFSTVIAREVVEREHIGRVLYAGGDDLMAMFAVSDLLSAMRRLRLAYSGLAPEEGEAAHEMRFQNGFARRRGRLYLTMGENATASMGAVIAHHQAPLGAVLRALRGAEKTAKAYNRGSRDAFSLTIIKRAGGALELTLPWQMGGEDVIGALRTLSAALQKNAGASRRAAYNVRGWLRDLPKPVAVGGEAPFRRLLGQMLHYQFQRQKLEKEGAPIHAERLAKLCPVENPAKAADFIENMLSVAEFLARETRSLDT

SEQ ID NO: 148 - protein, 7 aa, Artificial sequence
  motif 11
  VARIANT (1)..(1): / replace = "Gly" / replace = "Ser" / replace = "Gln"
  VARIANT (2)..(2): / replace = "Tyr" / replace = "Phe" / replace = "Leu"
  VARIANT (3)..(3): / replace = "Phe" / replace = "Asn"
  VARIANT (5)..(5): / replace = "Ser"
  VARIANT (6)..(6): / replace = "Ser"
  VARIANT (7)..(7): / replace = "Pro" / replace = "Leu"
ARLHDPA

SEQ ID NO: 149 - protein, 8 aa, Artificial sequence
  motif 12
  VARIANT (2)..(2): / replace = "Gln"
  VARIANT (3)..(3): / replace = "Glu" / replace = "His"
  VARIANT (4)..(4): / replace = "Tyr" / replace = "Ser"
  VARIANT (5)..(5): / replace = "Ile"
  VARIANT (6)..(6): / replace = "Phe" / replace = "Ala" / replace = "Leu"
  VARIANT (8)..(8): / replace = "Asn"
PADTRIPD

SEQ ID NO: 150 - protein, 9 aa, Artificial sequence
  motif 13
  VARIANT (1)..(1): / replace = "Ser"
  VARIANT (2)..(2): / replace = "Ile" / replace = "Phe"
  VARIANT (3)..(3): / replace = "Ser" / replace = "Asn"
  VARIANT (5)..(5): / replace = "Ile"
  VARIANT (7)..(7): / replace = "Ser" / replace = "Gln" / replace = "Asp" / replace = "Arg"
  VARIANT (8)..(8): / replace = "Phe" / replace = "Tyr"
TLGPVQELI

SEQ ID NO: 151 - protein, 12 aa, Artificial sequence
  motif 14
  VARIANT (2)..(2): / replace = "Phe"
  VARIANT (3)..(3): / replace = "Tyr" / replace = "Phe"
  VARIANT (4)..(4): / replace = "Trp" / replace = "Met" / replace = "Thr"
  VARIANT (5)..(5): / replace = "Ser"
  VARIANT (7)..(7): / replace = "Tyr" / replace = "Trp" / replace = "Phe" / replace = "Met"
  VARIANT (8)..(8): / replace = "Ile" / replace = "Met"
  VARIANT (10)..(10): / replace = "Ser" / replace = "His"
  VARIANT (11)..(11): / replace = "Tyr" / replace = "Asp"
  VARIANT (12)..(12): / replace = "Phe"
DLWAGSHLLARL

SEQ ID NO: 152 - protein, 5 aa, Artificial sequence
  motif 15
  VARIANT (1)..(1): / replace = "Ile" / replace = "Val"
  VARIANT (2)..(2): / replace = "Tyr" / replace = "Thr"
  misc_feature (4)..(4): Xaa can be any naturally occurring amino acid
LFPXL

SEQ ID NO: 153 - protein, 5 aa, Artificial sequence
  motif 16
  VARIANT (1)..(1): / replace = "Met" / replace = "Phe" / replace = "Ile"
  VARIANT (4)..(4): / replace = "Val" / replace = "Thr"
  VARIANT (5)..(5): / replace = "Ile" / replace = "Leu"
LPNRF

SEQ ID NO: 154 - protein, 6 aa, Artificial sequence
  motif 17
  VARIANT (1)..(1): / replace = "Leu" / replace = "Gly" / replace = "Phe"
  misc_feature (5)..(5): Xaa can be any naturally occurring amino acid
  VARIANT (6)..(6): / replace = "Ile"
MDGDXM

SEQ ID NO: 155 - protein, 10 aa, Artificial sequence
  motif 18
  VARIANT (1)..(1): / replace = "Thr" / replace = "Gly" / replace = "Ala"
  VARIANT (3)..(3): / replace = "Gly" / replace = "Ser" / replace = "Thr"
  VARIANT (4)..(4): / replace = "Val" / replace = "Leu" / replace = "Thr" / replace = "Ile"
  VARIANT (6)..(6): / replace = "Ser" / replace = "Gln" / replace = "Asn" / replace = "Val" / replace = "Ala"
  VARIANT (7)..(7): / replace = "Leu" / replace = "Thr" / replace = "Gly" / replace = "Phe"
  VARIANT (8)..(8): / replace = "Leu" / replace = "Val"
  VARIANT (9)..(9): / replace = "Asn"
  VARIANT (10)..(10): / replace = "Glu" / replace = "Arg" / replace = "Leu"
SPARHLAISG

SEQ ID NO: 156 - protein, 13 aa, Artificial sequence
  motif 19
  VARIANT (2)..(2): / replace = "Lys"
  VARIANT (3)..(3): / replace = "Leu"
  VARIANT (4)..(4): / replace = "Ile"
  VARIANT (6)..(6): / replace = "Ser"
  VARIANT (11)..(11): / replace = "Val"
  VARIANT (12)..(12): / replace = "Phe" / replace = "Leu"
  VARIANT (13)..(13): / replace = "Thr"
GRVLYAGGDDLMA

SEQ ID NO: 157 - protein, 12 aa, Artificial sequence
  motif 20
  VARIANT (1)..(1): / replace = "Ser"
  VARIANT (2)..(2): / replace = "Met" / replace = "Ile" / replace = "Leu"
  VARIANT (4)..(4): / replace = "Ala" / replace = "Phe" / replace = "Cys" / replace = "Leu"
  VARIANT (6)..(6): / replace = "Val" / replace = "Ile" / replace = "Leu"
  VARIANT (7)..(7): / replace = "Thr" / replace = "Ala"
  VARIANT (9)..(9): / replace = "Val" / replace = "Gly"
  VARIANT (10)..(10): / replace = "Asp"
  VARIANT (11)..(11): / replace = "Tyr" / replace = "Lys"
  VARIANT (12)..(12): / replace = "Gln" / replace = "Ser"
TASMGAVIAHHK

SEQ ID NO: 158 - protein, 22 aa, Artificial sequence
  motif 21
  VARIANT (7)..(7): / replace = "Ile" / replace = "Met"
  VARIANT (8)..(8): / replace = "Arg" / replace = "Lys"
  VARIANT (15)..(15): / replace = "Trp"
  VARIANT (16)..(16): / replace = "Ile"
IKASRKFLDFWAGSYLLHYLSA

SEQ ID NO: 159 - protein, 8 aa, Artificial sequence
  motif 22
  VARIANT (2)..(2): / replace = "Leu"
LATAGFPN

SEQ ID NO: 160 - protein, 17 aa, Artificial sequence
  motif 23
  VARIANT (6)..(6): / replace = "Thr" / replace = "Arg" / replace = "Ile"
  VARIANT (8)..(8): / replace = "Arg" / replace = "Lys"
  VARIANT (12)..(12): / replace = "Thr"
  VARIANT (14)..(14): / replace = "Ile" / replace = "Thr"
  VARIANT (15)..(15): / replace = "Val" / replace = "Leu"
GLFDGSEMLNALELTKR

SEQ ID NO: 161 - protein, 19 aa, Artificial sequence
  motif 24
  VARIANT (6)..(6): / replace = "Ser"
  VARIANT (9)..(9): / replace = "Ser" / replace = "Asn"
  VARIANT (10)..(10): / replace = "Ala"
  VARIANT (12)..(12): / replace = "Ser"
KRMGPATHVGLNRALLDFS

SEQ ID NO: 162 - protein, 7 aa, Artificial sequence
  motif 25
  VARIANT (2)..(2): / replace = "Ala"
YSGGDDV

SEQ ID NO: 163 - protein, 34 aa, Artificial sequence
  motif 26
  VARIANT (4)..(4): / replace = "Leu"
  VARIANT (6)..(6): / replace = "Lys" / replace = "Ser" / replace = "Gln" / replace = "Asp"
  VARIANT (7)..(7): / replace = "Cys" / replace = "Leu" / replace = "Ala" / replace = "Asn"
  VARIANT (9)..(9): / replace = "Ser"
  VARIANT (10)..(10): / replace = "Ile"
  VARIANT (12)..(12): / replace = "Phe"
  VARIANT (14)..(14): / replace = "Val" / replace = "Leu"
  VARIANT (15)..(15): / replace = "Thr"
  VARIANT (17)..(17): / replace = "Ala"
  VARIANT (18)..(18): / replace = "His"
  VARIANT (19)..(19): / replace = "His"
  VARIANT (21)..(21): / replace = "Ile"
  VARIANT (24)..(24): / replace = "Ala"
  VARIANT (25)..(25): / replace = "Ile"
  VARIANT (29)..(29): / replace = "Ser" / replace = "Asn"
  VARIANT (32)..(32): / replace = "Gln"
LFTMGFGATMSLGIVIVDKSVPLPVALEALWEAE

SEQ ID NO: 164 - DNA, 2194 bp, Oryza sativa
aatccgaaaagtttctgcaccgttttcaccccctaactaacaatatagggaacgtgtgctaaatataaaatgagaccttatatatgtagcgctgataactagaactatgcaagaaaaactcatccacctactttagtggcaatcgggctaaataaaaaagagtcgctacactagtttcgttttccttagtaattaagtgggaaaatgaaatcattattgcttagaatatacgttcacatctctgtcatgaagttaaattattcgaggtagccataattgtcatcaaactcttcttgaataaaaaaatctttctagctgaactcaatgggtaaagagagagattttttttaaaaaaatagaatgaagatattctgaacgtattggcaaagatttaaacatataattatataattttatagtttgtgcattcgtcatatcgcacatcattaaggacatgtcttactccatcccaatttttatttagtaattaaagacaattgacttatttttattatttatcttttttcgattagatgcaaggtacttacgcacacactttgtgctcatgtgcatgtgtgagtgcacctcctcaatacacgttcaactagcaacacatctctaatatcactcgcctatttaatacatttaggtagcaatatctgaattcaagcactccaccatcaccagaccacttttaataatatctaaaatacaaaaaataattttacagaatagcatgaaaagtatgaaacgaactatttaggtttttcacatacaaaaaaaaaaagaattttgctcgtgcgcgagcgccaatctcccatattgggcacacaggcaacaacagagtggctgcccacagaacaacccacaaaaaacgatgatctaacggaggacagcaagtccgcaacaaccttttaacagcaggctttgcggccaggagagaggaggagaggcaaagaaaaccaagcatcctccttctcccatctataaattcctccccccttttcccctctctatataggaggcatccaagccaagaagagggagagcaccaaggacacgcgactagcagaagccgagcgaccgccttctcgatccatatcttccggtcgagttcttggtcgatctcttccctcctccacctcctcctcacagggtatgtgcctcccttcggttgttcttggatttattgttctaggttgtgtagtacgggcgttgatgttaggaaaggggatctgtatctgtgatgattcctgttcttggatttgggatagaggggttcttgatgttgcatgttatcggttcggtttgattagtagtatggttttcaatcgtctggagagctctatggaaatgaaatggtttagggatcggaatcttgcgattttgtgagtaccttttgtttgaggtaaaatcagagcaccggtgattttgcttggtgtaataaagtacggttgtttggtcctcgattctggtagtgatgcttctcgatttgacgaagctatcctttgtttattccctattgaacaaaaataatccaactttgaagacggtcccgttgatgagattgaatgattgattcttaagcctgtccaaaatttcgcagctggcttgtttagatacagtagtccccatcacgaaattcatggaaacagttataatcctcaggaacaggggattccctgttcttccgatttgctttagtcccagaattttttttcccaaatatcttaaaaagtcactttctggttcagttcaatgaattgattgctacaaataatgcttttatagcgttatcctagctgtagttcagttaataggtaatacccctatagtttagtcaggagaagaacttatccgatttctgatctccatttttaattatatgaaatgaactgtagcataagcagtattcatttggattattttttttattagctctcaccccttcattattctgagctgaaagtctggcatgaactgtcctcaattttgttttcaaattcacatcgattatctatgcattatcctcttgtatctacctgtagaagtttctttttggttattccttgactgcttgattacagaaagaaatttatgaagctgtaatcgggatagttatactgcttgttcttatgattcatttcctttgtgcagttcttggtgtagcttgccactttcaccagcaaagttc

SEQ ID NO: 165 - DNA, 57 bp, Artificial sequence
  primer: prm14240
ggggacaagtttgtacaaaaaagcaggcttaaacaatgtctgaagtttactggcaag

SEQ ID NO: 166 - DNA, 53 bp, Artificial sequence
  primer: prm14239
ggggaccactttgtacaagaaagctgggtttaattgggaaatttaatgtaacg
